(19) United States
(12) Patent Application Publication
(10) Pub. No.: US 2004/0067882 A1
(43) Pub. Date: Apr. 8, 2004

(54) Therapeutic polypeptides, nucleic acids encoding same, and methods of use

(76) Inventors: John P. Alsobrook II, Madison, CT (US); Enrique Alvarez, Clinton, CT (US); David W. Anderson, Branford, CT (US); Melanie Baron, Branford, CT (US); Ferenc L. Boldog, North Haven, CT (US); Catherine E. Burgess, Wethersfield, CT (US); Stacie J. Casman, North Haven, CT (US); Andrei Chapoval, Branford, CT (US); Mohanraj Dhanabal, Branford, CT (US); Shlomit R. Edinger, New Haven, CT (US); Andrew Eisen, Rockville, MD (US); Karen Ellerman, Branford, CT (US); Seth Ettenberg, New Haven, CT (US); Esha A. Gangolli, Madison, CT (US); Valerie Gerlach, Branford, CT (US); Linda Gorman, Branford, CT (US); William M. Grosse, Branford, CT (US); Xiaojia (Sasha) Guo, Branford, CT (US); Craig Hackett, Branford, CT (US); Weizhen Ji, Branford, CT (US); Ramesh Kekuda, Norwalk, CT (US); Nikolai V. Khramtsov, Branford, CT (US); Denise M. Lepley, Farmington, CT (US); Li Li, Branford, CT (US); John R. MacDougall, Hamden, CT (US); Uriel M. Malyankar, Branford, CT (US); Ann Mazur, Bloomfield, CT (US); Kelly McQueeney, Ansonia, CT (US); Peter S. Mezes, Old Lyme, CT (US); Charles E. Miller, Guilford, CT (US); Isabelle Millet, Milford, CT (US); Vishnu Mishra, Gainesville, FL (US); Muralidhara Padigaru, Branford, CT (US); Meera Patturajan, Branford, CT (US); Carol E. A. Pena, New Haven, CT (US); John A. Peyman, New Haven, CT (US); Luca Rastelli, Guilford, CT (US); Daniel K. Rieger, Branford, CT (US); Mark E. Rothenberg, Clinton, CT (US); Suresh G. Shenoy, Branford, CT (US); Richard A. Shimkets, Guilford, CT (US); Glennda Smithson, Guilford, CT (US); Steven K. Spaderna, Berlin, CT (US); Gary Starling, Clinton, CT (US); Kimberly A. Spytek, New Haven, CT (US); David J. Stone, Guilford, CT (US); Velizar T. Tchernev, Branford, CT (US); Nancy Twomlow, Madison, CT (US); Corine A.M. Vernet, Branford, CT (US); Bryan D. Zerhusen, Branford, CT (US); Edward Z. Voss, Wallingford, CT (US); Mei Zhong, Branford, CT (US)

Correspondence Address: MINTZ, LEVIN, COHN, FERRIS, GLOVSKY, AND POPEO, P.C., ONE FINANCIAL CENTER, BOSTON, MA, 02111, US

(21) Appl. No.: 10/287,971

(22) Filed: Nov. 5, 2002

Related U.S. Application Data
(63) Continuation-in-part of application No. 09/997,425, filed on Nov. 29, 2001.
(63) Continuation-in-part of application No. 10/035,568, filed on Oct. 22, 2001.
(60) Provisional application No. 60/338,626, filed on Nov. 5, 2001.
(60) Provisional application No. 60/401,479, filed on Aug. 6, 2002.
(60) Provisional application No. 60/333,072, filed on Nov. 6, 2001.
(60) Provisional application No. 60/348,283, filed on Nov. 9, 2001.
(60) Provisional application No. 60/393,262, filed on Jul. 2, 2002.
(60) Provisional application No. 60/406,181, filed on Aug. 26, 2002.
(60) Provisional application No. 60/345,398, filed on Nov. 9, 2001.
(60) Provisional application No. 60/335,610, filed on Nov. 15, 2001.
(60) Provisional application No. 60/380,968, filed on May 15, 2002.
(60) Provisional application No. 60/332,152, filed on Nov. 21, 2001.
(60) Provisional application No. 60/336,576, filed on Dec. 4, 2001.
(60) Provisional application No. 60/354,807, filed on Feb. 5, 2002.
(60) Provisional application No. 60/393,148, filed on Jul. 2, 2002.
(60) Provisional application No. 60/401,626, filed on Aug. 6, 2002.
(60) Provisional application No. 60/401,695, filed on Aug. 7, 2002.
(60) Provisional application No. 60/333,912, filed on Nov. 28, 2001.
(60) Provisional application No. 60/381,043, filed on May 16, 2002.
(60) Provisional application No. 60/401,593, filed on Aug. 7, 2002.
(60) Provisional application No. 60/334,300, filed on Nov. 29, 2001.

(51) Int. Cl. G01N 33/53; A61K 38/17; C07K 14/47

(52) U.S. Cl. 514/12; 530/350; 435/7.1

(57) ABSTRACT

Disclosed herein are nucleic acid sequences that encode novel polypeptides. Also disclosed are polypeptides encoded by these nucleic acid sequences, and antibodies that immunospecifically bind to the polypeptide, as well as derivatives, variants, mutants, or fragments of the novel polypeptide, polynucleotide, or antibody specific to the polypeptide. Vectors, host cells, antibodies and recombinant methods for producing the polypeptides and polynucleotides, as well as methods for using same are also included. The invention further discloses therapeutic, diagnostic and research methods for diagnosis, treatment, and prevention of disorders involving any one of these novel human nucleic acids and proteins.

### RELATED APPLICATIONS

[0001] This application is a continuation-in-part of U.S. Ser. No. 09/997,425, filed Nov. 29, 2001 and U.S. Ser. No. 10/035,568, filed Oct. 22, 2001; this application also claims priority to provisional patent applications U.S. Ser. No. 60/338,626, filed Nov. 5, 2001, U.S. Ser. No. 60/401,479, filed Aug. 6, 2002, U.S. Ser. No. 60/333,072, filed Nov. 6, 2001, U.S. Ser. No. 60/348,283, filed Nov. 9, 2001, U.S. Ser. No. 60/393,262, filed Jul. 2, 2002, U.S. Ser. No. 60/406,181, filed Aug. 26, 2002, U.S. Ser. No. 60/345,398, filed Nov. 9, 2001, U.S. Ser. No. 60/335,610, filed Nov. 15, 2001, U.S. Ser. No. 60/380,968, filed May 15, 2002, U.S. Ser. No. 60/332,152, filed Nov. 21, 2001, U.S. Ser. No. 60/336,576, filed Dec. 4, 2001, U.S. Ser. No. 60/354,807, filed Feb. 5, 2002, U.S. Ser. No. 60/393,148, filed Jul. 2, 2002, U.S. Ser. No. 60/401,626, filed Aug. 6, 2002, U.S. Ser. No. 60/401,695, filed Aug. 7, 2002, U.S. Ser. No. 60/333,912, filed Nov. 28, 2001, U.S. Ser. No. 60/381,043, filed May 16, 2002, U.S. Ser. No. 60/401,593, filed Aug. 7, 2002, U.S. Ser. No. 60/334,300, filed Nov. 29, 2001, each of which is incorporated herein by reference in its entirety.

### FIELD OF THE INVENTION

[0002] The present invention relates to novel polypeptides, and the nucleic acids encoding them, having properties related to stimulation of biochemical or physiological responses in a cell, a tissue, an organ or an organism. More particularly, the novel polypeptides are gene products of novel genes, or are specified biologically active fragments or derivatives thereof. Methods of use encompass diagnostic and prognostic assay procedures as well as methods of treating diverse pathological conditions.

### BACKGROUND OF THE INVENTION

[0003] Eukaryotic cells are characterized by biochemical and physiological processes which under normal conditions are exquisitely balanced to achieve the preservation and propagation of the cells. When such cells are components of multicellular organisms such as vertebrates, or more particularly organisms such as mammals, the regulation of the biochemical and physiological processes involves intricate signaling pathways. Frequently, such signaling pathways involve extracellular signaling proteins, cellular receptors that bind the signaling proteins, and signal transducing components located within the cells.

[0004] Signaling proteins may be classified as endocrine effectors, paracrine effectors or autocrine effectors. Endocrine effectors are signaling molecules secreted by a given organ into the circulatory system, which are then transported to a distant target organ or tissue. The target cells include the receptors for the endocrine effector, and when the endocrine effector binds, a signaling cascade is induced. Paracrine effectors involve secreting cells and receptor cells in close proximity to each other, for example two different classes of cells in the same tissue or organ. One class of cells secretes the paracrine effector, which then reaches the second class of cells, for example by diffusion through the extracellular fluid. The second class of cells contains the receptors for the paracrine effector; binding of the effector results in induction of the signaling cascade that elicits the corresponding biochemical or physiological effect. Autocrine effectors are highly analogous to paracrine effectors, except that the same cell type that secretes the autocrine effector also contains the receptor. Thus the autocrine effector binds to receptors on the same cell, or on identical neighboring cells. The binding process then elicits the characteristic biochemical or physiological effect.

[0005] Signaling processes may elicit a variety of effects on cells and tissues including by way of nonlimiting example induction of cell or tissue proliferation, suppression of growth or proliferation, induction of differentiation or maturation of a cell or tissue, and suppression of differentiation or maturation of a cell or tissue.

[0006] Many pathological conditions involve dysregulation of expression of important effector proteins. In certain classes of pathologies the dysregulation is manifested as diminished or suppressed level of synthesis and secretion of protein effectors. In other classes of pathologies the dysregulation is manifested as increased or up-regulated level of synthesis and secretion of protein effectors. In a clinical setting a subject may be suspected of suffering from a condition brought on by altered or mis-regulated levels of a protein effector of interest. Therefore there is a need to assay for the level of the protein effector of interest in a biological sample from such a subject, and to compare the level with that characteristic of a nonpathological condition. There also is a need to provide the protein effector as a product of manufacture. Administration of the effector to a subject in need thereof is useful in treatment of the pathological condition. Accordingly, there is a need for a method of treatment of a pathological condition brought on by a diminished or suppressed levels of the protein effector of interest. In addition, there is a need for a method of treatment of a pathological condition brought on by a increased or up-regulated levels of the protein effector of interest.

[0007] Antibodies are multichain proteins that bind specifically to a given antigen, and bind poorly, or not at all, to substances deemed not to be cognate antigens. Antibodies are comprised of two short chains termed light chains and two long chains termed heavy chains. These chains are constituted of immunoglobulin domains, of which generally there are two classes: one variable domain per chain, one constant domain in light chains, and three or more constant domains in heavy chains. The antigen-specific portion of the immunoglobulin molecules resides in the variable domains; the variable domains of one light chain and one heavy chain associate with each other to generate the antigen-binding moiety. Antibodies that bind immunospecifically to a cognate or target antigen bind with high affinities. Accordingly, they are useful in assaying specifically for the presence of the antigen in a sample. In addition, they have the potential of inactivating the activity of the antigen.

[0008] Therefore there is a need to assay for the level of a protein effector of interest in a biological sample from such a subject, and to compare this level with that characteristic of a nonpathological condition. In particular, there is a need for such an assay based on the use of an antibody that binds immunospecifically to the antigen. There further is a need to inhibit the activity of the protein effector in cases where a pathological condition arises from elevated or excessive levels of the effector based on the use of an antibody that binds immunospecifically to the effector. Thus, there is a need for the antibody as a product of manufacture. There further is a need for a method of treatment of a pathological condition brought on by an elevated or excessive level of the protein effector of interest based on administering the antibody to the subject.

### SUMMARY OF THE INVENTION

[0009] The invention is based in part upon the discovery of isolated polypeptides including amino acid sequences selected from mature forms of the amino acid sequences selected from the group consisting of SEQ ID NO:2n, wherein n is an integer between 1 and 141. The novel nucleic acids and polypeptides are referred to herein as NOVX, or NOV1, NOV2, NOV3, etc., nucleic acids and polypeptides. These nucleic acids and polypeptides, as well as derivatives, homologs, analogs and fragments thereof, will hereinafter be collectively designated as “NOVX” nucleic acid or polypeptide sequences.

[0010] The invention also is based in part upon variants of a mature form of the amino acid sequence selected from the group consisting of SEQ ID NO:2n, wherein n is an integer between 1 and 141, wherein any amino acid in the mature form is changed to a different amino acid, provided that no more than 15% of the amino acid residues in the sequence of the mature form are so changed. In another embodiment, the invention includes the amino acid sequences selected from the group consisting of SEQ ID NO:2n, wherein n is an integer between 1 and 141. In another embodiment, the invention also comprises variants of the amino acid sequence selected from the group consisting of SEQ ID NO:2n, wherein n is an integer between 1 and 141 wherein any amino acid specified in the chosen sequence is changed to a different amino acid, provided that no more than 15% of the amino acid residues in the sequence are so changed. The invention also involves fragments of any of the mature forms of the amino acid sequences selected from the group consisting of SEQ ID NO:2n, wherein n is an integer between 1 and 141, or any other amino acid sequence selected from this group. The invention also comprises fragments from these groups in which up to 15% of the residues are changed.

[0011] In another embodiment, the invention encompasses polypeptides that are naturally occurring allelic variants of the sequence selected from the group consisting of SEQ ID NO:2n, wherein n is an integer between 1 and 141. These allelic variants include amino acid sequences that are the translations of nucleic acid sequences differing by a single nucleotide from nucleic acid sequences selected from the group consisting of SEQ ID NOS: 2n−1, wherein n is an integer between 1 and 141. The variant polypeptide where any amino acid changed in the chosen sequence is changed to provide a conservative substitution.

[0012] In another embodiment, the invention comprises a pharmaceutical composition involving a polypeptide with an amino acid sequence selected from the group consisting of SEQ ID NO:2n, wherein n is an integer between 1 and 141 and a pharmaceutically acceptable carrier. In another embodiment, the invention involves a kit, including, in one or more containers, this pharmaceutical composition.

[0013] In another embodiment, the invention includes the use of a therapeutic in the manufacture of a medicament for treating a syndrome associated with a human disease, the disease being selected from a pathology associated with a polypeptide with an amino acid sequence selected from the group consisting of SEQ ID NO:2n, wherein n is an integer between 1 and 141 wherein said therapeutic is the polypeptide selected from this group.

[0014] In another embodiment, the invention comprises a method for determining the presence or amount of a polypeptide with an amino acid sequence selected from the group consisting of SEQ ID NO:2n, wherein n is an integer between 1 and 141 in a sample, the method involving providing the sample; introducing the sample to an antibody that binds immunospecifically to the polypeptide; and determining the presence or amount of antibody bound to the polypeptide, thereby determining the presence or amount of polypeptide in the sample.

[0015] In another embodiment, the invention includes a method for determining the presence of or predisposition to a disease associated with altered levels of a polypeptide with an amino acid sequence selected from the group consisting of SEQ ID NO:2n, wherein n is an integer between 1 and 141 in a first mammalian subject, the method involving measuring the level of expression of the polypeptide in a sample from the first mammalian subject; and comparing the amount of the polypeptide in this sample to the amount of the polypeptide present in a control sample from a second mammalian subject known not to have, or not to be predisposed to, the disease, wherein an alteration in the expression level of the polypeptide in the first subject as compared to the control sample indicates the presence of or predisposition to the disease.

[0016] In another embodiment, the invention involves a method of identifying an agent that binds to a polypeptide with an amino acid sequence selected from the group consisting of SEQ ID NO:2n, wherein n is an integer between 1 and 141, the method including introducing the polypeptide to the agent; and determining whether the agent binds to the polypeptide. The agent could be a cellular receptor or a downstream effector.

[0017] In another embodiment, the invention involves a method for identifying a potential therapeutic agent for use in treatment of a pathology, wherein the pathology is related to aberrant expression or aberrant physiological interactions of a polypeptide with an amino acid sequence selected from the group consisting of SEQ ID NO:2n, wherein n is an integer between 1 and 141, the method including providing a cell expressing the polypeptide of the invention and having a property or function ascribable to the polypeptide; contacting the cell with a composition comprising a candidate substance; and determining whether the substance alters the property or function ascribable to the polypeptide; whereby, if an alteration observed in the presence of the substance is not observed when the cell is contacted with a composition devoid of the substance, the substance is identified as a potential therapeutic agent.

[0018] In another embodiment, the invention involves a method for screening for a modulator of activity or of latency or predisposition to a pathology associated with a polypeptide having an amino acid sequence selected from the group consisting of SEQ ID NO:2n, wherein n is an integer between 1 and 141, the method including administering a test compound to a test animal at increased risk for a pathology associated with the polypeptide of the invention, wherein the test animal recombinantly expresses the polypeptide of the invention; measuring the activity of the polypeptide in the test animal after administering the test compound; and comparing the activity of the protein in the test animal with the activity of the polypeptide in a control animal not administered the polypeptide, wherein a change in the activity of the polypeptide in the test animal relative to the control animal indicates the test compound is a modulator of latency of, or predisposition to, a pathology associated with the polypeptide of the invention. The recombinant test animal could express a test protein transgene or express the transgene under the control of a promoter at an increased level relative to a wild-type test animal The promoter may or may not b the native gene promoter of the transgene.

[0019] In another embodiment, the invention involves a method for modulating the activity of a polypeptide with an amino acid sequence selected from the group consisting of SEQ ID NO:2n, wherein n is an integer between 1 and 141, the method including introducing a cell sample expressing the polypeptide with a compound that binds to the polypeptide in an amount sufficient to modulate the activity of the polypeptide.

[0020] In another embodiment, the invention involves a method of treating or preventing a pathology associated with a polypeptide with an amino acid sequence selected from the group consisting of SEQ ID NO:2n, wherein n is an integer between 1 and 141, the method including administering the polypeptide to a subject in which such treatment or prevention is desired in an amount sufficient to treat or prevent the pathology in the subject. The subject could be human.

[0021] In another embodiment, the invention involves a method of treating a pathological state in a mammal, the method including administering to the mammal a polypeptide in an amount that is sufficient to alleviate the pathological state, wherein the polypeptide is a polypeptide having an amino acid sequence at least 95% identical to a polypeptide having the amino acid sequence selected from the group consisting of SEQ ID NO:2n, wherein n is an integer between 1 and 141 or a biologically active fragment thereof.

[0022] In another embodiment, the invention involves an isolated nucleic acid molecule comprising a nucleic acid sequence encoding a polypeptide having an amino acid sequence selected from the group consisting of a mature form of the amino acid sequence given SEQ ID NO:2n, wherein n is an integer between 1 and 141; a variant of a mature form of the amino acid sequence selected from the group consisting of SEQ ID NO:2n, wherein n is an integer between 1 and 141 wherein any amino acid in the mature form of the chosen sequence is changed to a different amino acid, provided that no more than 15% of the amino acid residues in the sequence of the mature form are so changed; the amino acid sequence selected from the group consisting of SEQ ID NO:2n, wherein n is an integer between 1 and 141; a variant of the amino acid sequence selected from the group consisting of SEQ ID NO:2n, wherein n is an integer between 1 and 141, in which any amino acid specified in the chosen sequence is changed to a different amino acid, provided that no more than 15% of the amino acid residues in the sequence are so changed; a nucleic acid fragment encoding at least a portion of a polypeptide comprising the amino acid sequence selected from the group consisting of SEQ ID NO:2n, wherein n is an integer between 1 and 141 or any variant of the polypeptide wherein any amino acid of the chosen sequence is changed to a different amino acid, provided that no more than 10% of the amino acid residues in the sequence are so changed; and the complement of any of the nucleic acid molecules.

[0023] In another embodiment, the invention comprises an isolated nucleic acid molecule having a nucleic acid sequence encoding a polypeptide comprising an amino acid sequence selected from the group consisting of a mature form of the amino acid sequence given SEQ ID NO:2n, wherein n is an integer between 1 and 141, wherein the nucleic acid molecule comprises the nucleotide sequence of a naturally occurring allelic nucleic acid variant.

[0024] In another embodiment, the invention involves an isolated nucleic acid molecule including a nucleic acid sequence encoding a polypeptide having an amino acid sequence selected from the group consisting of a mature form of the amino acid sequence given SEQ ID NO:2n, wherein n is an integer between 1 and 141 that encodes a variant polypeptide, wherein the variant polypeptide has the polypeptide sequence of a naturally occurring polypeptide variant.

[0025] In another embodiment, the invention comprises an isolated nucleic, acid molecule having a nucleic acid sequence encoding a polypeptide comprising an amino acid sequence selected from the group consisting of a mature form of the amino acid sequence given SEQ ID NO:2n, wherein n is an integer between 1 and 141, wherein the nucleic acid molecule differs by a single nucleotide from a nucleic acid sequence selected from the group consisting of SEQ ID NOS: 2n−1, wherein n is an integer between 1 and 141.

[0026] In another embodiment, the invention includes an isolated nucleic acid molecule having a nucleic acid sequence encoding a polypeptide including an amino acid sequence selected from the group consisting of a mature form of the amino acid sequence given SEQ ID NO:2n, wherein n is an integer between 1 and 141, wherein the nucleic acid molecule comprises a nucleotide sequence selected from the group consisting of the nucleotide sequence selected from the group consisting of SEQ ID NO:2n−1, wherein n is an integer between 1 and 141; a nucleotide sequence wherein one or more nucleotides in the nucleotide sequence selected from the group consisting of SEQ ID NO:2n−1, wherein n is an integer between 1 and 141 is changed from that selected from the group consisting of the chosen sequence to a different nucleotide provided that no more than 15% of the nucleotides are so changed; a nucleic acid fragment of the sequence selected from the group consisting of SEQ ID NO:2n−1, wherein n is an integer between 1 and 141; and a nucleic acid fragment wherein one or more nucleotides in the nucleotide sequence selected from the group consisting of SEQ ID NO:2n−1, wherein n is an integer between 1 and 141 is changed from that selected from the group consisting of the chosen sequence to a different nucleotide provided that no more than 15% of the nucleotides are so changed.

[0027] In another embodiment, the invention includes an isolated nucleic acid molecule having a nucleic acid sequence encoding a polypeptide including an amino acid sequence selected from the group consisting of a mature form of the amino acid sequence given SEQ ID NO:2n, wherein n is an integer between 1 and 141, wherein the nucleic acid molecule hybridizes under stringent conditions to the nucleotide sequence selected from the group consisting of SEQ ID NO:2n−1, wherein n is an integer between 1 and 141, or a complement of the nucleotide sequence.

[0028] In another embodiment, the invention includes an isolated nucleic acid molecule having a nucleic acid sequence encoding a polypeptide including an amino acid sequence selected from the group consisting of a mature form of the amino acid sequence given SEQ ID NO:2n, wherein n is an integer between 1 and 141, wherein the nucleic acid molecule has a nucleotide sequence in which any nucleotide specified in the coding sequence of the chosen nucleotide sequence is changed from that selected from the group consisting of the chosen sequence to a different nucleotide provided that no more than 15% of the nucleotides in the chosen coding sequence are so changed, an isolated second polynucleotide that is a complement of the first polynucleotide, or a fragment of any of them.

[0029] In another embodiment, the invention includes a vector involving the nucleic acid molecule having a nucleic acid sequence encoding a polypeptide including an amino acid sequence selected from the group consisting of a mature form of the amino acid sequence given SEQ ID NO:2n, wherein n is an integer between 1 and 141. This vector can have a promoter operably linked to the nucleic acid molecule. This vector can be located within a cell.

[0030] In another embodiment, the invention involves a method for determining the presence or amount of a nucleic acid molecule having a nucleic acid sequence encoding a polypeptide including an amino acid sequence selected from the group consisting of a mature form of the amino acid sequence given SEQ ID NO:2n, wherein n is an integer between 1 and 141 in a sample, the method including providing the sample; introducing the sample to a probe that binds to the nucleic acid molecule; and determining the presence or amount of the probe bound to the nucleic acid molecule, thereby determining the presence or amount of the nucleic acid molecule in the sample. The presence or amount of the nucleic acid molecule is used as a marker for cell or tissue type. The cell type can be cancerous.

[0031] In another embodiment, the invention involves a method for determining the presence of or predisposition for a disease associated with altered levels of a nucleic acid molecule having a nucleic acid sequence encoding a polypeptide including an amino acid sequence selected from the group consisting of a mature form of the amino acid sequence given SEQ ID NO:2n, wherein n is an integer between 1 and 141 in a first mammalian subject, the method including measuring the amount of the nucleic acid in a sample from the first mammalian subject; and comparing the amount of the nucleic acid in the sample of step (a) to the amount of the nucleic acid present in a control sample from a second mammalian subject known not to have or not be predisposed to, the disease; wherein an alteration in the level of the nucleic acid in the first subject as compared to the control sample indicates the presence of or predisposition to the disease.

[0032] The invention further provides an antibody that binds immunospecifically to a NOVX polypeptide. The NOVX antibody may be monoclonal, humanized, or a fully human antibody. Preferably, the antibody has a dissociation constant for the binding of the NOVX polypeptide to the antibody less than 1×10⁻⁹ M. More preferably, the NOVX antibody neutralizes the activity of the NOVX polypeptide.

[0033] In a further aspect, the invention provides for the use of a therapeutic in the manufacture of a medicament for treating a syndrome associated with a human disease, associated with a NOVX polypeptide. Preferably the therapeutic is a NOVX antibody.

[0034] In yet a further aspect, the invention provides a method of treating or preventing a NOVX-associated disorder, a method of treating a pathological state in a mammal, and a method of treating or preventing a pathology associated with a polypeptide by administering a NOVX antibody to a subject in an amount sufficient to treat or prevent the disorder.

[0035] Unless otherwise defined, all technical and scientific terms used herein have the same meaning as commonly understood by one of ordinary skill in the art to which this invention belongs. Although methods and materials similar or equivalent to those described herein can be used in the practice or testing of the present invention, suitable methods and materials are described below. All publications, patent applications, patents, and other references mentioned herein are incorporated by reference in their entirety. In the case of conflict, the present specification, including definitions, will control. In addition, the materials, methods, and examples are illustrative only and are not intended to be limiting.

[0036] Other features and advantages of the invention will be apparent from the following detailed description and claims.

### DETAILED DESCRIPTION OF THE INVENTION

[0037] The present invention provides novel nucleotides and polypeptides encoded thereby. Included in the invention are the novel nucleic acid sequences, their encoded polypeptides, antibodies, and other related compounds. The sequences are collectively referred to herein as “NOVX nucleic acids” or “NOVX polynucleotides” and the corresponding encoded polypeptides are referred to as “NOVX polypeptides” or “NOVX proteins.” Unless indicated otherwise, “NOVX” is meant to refer to any of the novel sequences disclosed herein. Table A provides a summary of the NOVX nucleic acids and their encoded polypeptides.

TABLE A
Sequences and Corresponding SEQ ID Numbers

| | | SEQ ID NO | SEQ ID NO | |
|---|---|---|---|---|
| NOVX | Internal | (nucleic | (amino | |
| Assignment | Identification | acid) | acid) | Homology |
| 1a | CG103134-01 | 1 | 2 | Kunitz-type Protease |
| | | | | Inhibitor 2 |
| | | | | precursor-like |
| 1b | CG103134-02 | 3 | 4 | Kunitz-type Protease |
| | | | | Inhibitor 2 |
| | | | | precursor-like |
| 2a | CG103322-01 | 5 | 6 | CD82 Antigen-like |
| 2b | CG103322-02 | 7 | 8 | CD82 Antigen-like |
| 3a | CG151575-01 | 9 | 10 | Multi-pass Membrane |
| | | | | Protein-like |
| 3b | CG151575-02 | 11 | 12 | Multi-pass Membrane |
| | | | | Protein-like |
| 4a | CG151608-01 | 13 | 14 | Type 1b Membrane |
| | | | | Protein-like |
| 4b | CG151608-02 | 15 | 16 | Type 1b Membrane |
| | | | | Protein-like |
| 5a | CG152323-01 | 17 | 18 | Laminin beta 4-like |
| 6a | CG153011-01 | 19 | 20 | Sushi Domain-containing |
| | | | | Membrane Protein-like |
| 7a | CG153042-01 | 21 | 22 | RIK Protein-like |
| 7b | CG153042-02 | 23 | 24 | RIK Protein-like |
| 8a | CG153179-01 | 25 | 26 | Membrane Protein-like |
| 9a | CG153403-01 | 27 | 28 | Dickkopf Related |
| | | | | Protein-4 |
| | | | | Precursor-like |
| 9b | CG153403-02 | 29 | 30 | Dickkopf Related |
| | | | | Protein-4 |
| | | | | Precursor-like |
| 9c | 305037558 | 31 | 32 | Dickkopf Related |
| | | | | Protein-4 |
| | | | | Precursor-like |
| 9d | 305037512 | 33 | 34 | Dickkopf Related |
| | | | | Protein-4 |
| | | | | Precursor-like |
| 10a | CG153424-01 | 35 | 36 | IGFBP4-like |
| 11a | CG157567-01 | 37 | 38 | Leucine Rich Repeat |
| | | | | Protein-like |
| 12a | CG157760-01 | 39 | 40 | Placental Specific |
| | | | | Protein 1-like |
| 12b | CG157760-02 | 41 | 42 | Placental Specific |
| | | | | Protein 1-like |
| 13a | CG157844-01 | 43 | 44 | Type IIIb Membrane |
| | | | | Protein-like |
| 14a | CG158114-01 | 45 | 46 | Silver-like |
| 15a | CG158553-01 | 47 | 48 | Erythropoietin |
| | | | | Receptor-like |
| 15b | CG158553-01 | 49 | 50 | Erythropoietin |
| | | | | Receptor-like |
| 15c | CG158553-02 | 51 | 52 | Erythropoietin |
| | | | | Receptor-like |
| 15d | CG158553-03 | 53 | 54 | Erythropoietin |
| | | | | Receptor-like |
| 16a | CG158983-01 | 55 | 56 | Chloride Channel-like |
| 16b | CG158983-02 | 57 | 58 | Chloride Channel-like |
| 16c | CG158983-03 | 59 | 60 | Chloride Channel-like |
| 16d | CG158983-01 | 61 | 62 | Chloride Channel-like |
| 16e | CG158983-01 | 63 | 64 | Chloride Channel-like |
| 17a | CG159015-01 | 65 | 66 | Secreted Protein-like |
| 17b | CG159015-02 | 67 | 68 | Secreted Protein-like |
| 17c | CG159015-03 | 69 | 70 | Secreted Protein-like |
| 17d | CG159015-04 | 71 | 72 | Secreted Protein-like |
| 18a | CG173007-01 | 73 | 74 | Prolactin Receptor |
| | | | | Precursor-like |
| 19a | CG173357-01 | 75 | 76 | Immunoglobulin Domain |
| | | | | Containing Protein-like |
| 20a | CG50387-01 | 77 | 78 | Connexin 46 |
| 20b | CG50387-03 | 79 | 80 | Connexin 46 |
| 20c | CG50387-02 | 81 | 82 | Connexin 46 |
| 21a | CG52113-01 | 83 | 84 | Notch4-like |
| 21b | CG52113-06 | 85 | 86 | Notch4-like |
| 21c | 274054261 | 87 | 88 | Notch4-like |
| 21d | 274054299 | 89 | 90 | Notch4-like |
| 21e | 274054261 | 91 | 92 | Notch4-like |
| 21f | 274054299 | 93 | 94 | Notch4-like |
| 21g | CG52113-02 | 95 | 96 | Notch4-like |
| 21h | CG52113-03 | 97 | 98 | Notch4-like |
| 21i | CG52113-04 | 99 | 100 | Notch4-like |
| 21j | CG52113-05 | 101 | 102 | Notch4-like |
| 22a | CG57542-01 | 103 | 104 | Cadherin-23 |
| | | | | Precursor-like |
| 22b | 169258612 | 105 | 106 | Cadherin-23 |
| | | | | Precursor-like |
| 22c | 169258615 | 107 | 108 | Cadherin-23 |
| | | | | Precursor-like |
| 22d | 169258621 | 109 | 110 | Cadherin-23 |
| | | | | Precursor-like |
| 22e | 174307774 | 111 | 112 | Cadherin-23 |
| | | | | Precursor-like |
| 23a | CG57774-01 | 113 | 114 | TRNFR-19 Protein |
| 23b | 167200132 | 115 | 116 | TRNFR-19 Protein |
| 23c | 167200144 | 117 | 118 | TRNFR-19 Protein |
| 23d | 169252408 | 119 | 120 | TRNFR-19 Protein |
| 23e | 169252412 | 121 | 122 | TRNFR-19 Protein |
| 23f | 169252424 | 123 | 124 | TRNFR-19 Protein |
| 23g | 169252469 | 125 | 126 | TRNFR-19 Protein |
| 23h | 169252475 | 127 | 128 | TRNFR-19 Protein |
| 23i | 169252481 | 129 | 130 | TRNFR-19 Protein |
| 23j | 169252485 | 131 | 132 | TRNFR-19 Protein |
| 23k | 169252492 | 133 | 134 | TRNFR-19 Protein |
| 23l | 174104491 | 135 | 136 | TRNFR-19 Protein |
| 23m | 169252509 | 137 | 138 | TRNFR-19 Protein |
| 23n | 169252515 | 139 | 140 | TRNFR-19 Protein |
| 23o | 169252519 | 141 | 142 | TRNFR-19 Protein |
| 23p | 169252524 | 143 | 144 | TRNFR-19 Protein |
| 23q | 169252528 | 145 | 146 | TRNFR-19 Protein |
| 23r | 169252547 | 147 | 148 | TRNFR-19 Protein |
| 23s | 169252557 | 149 | 150 | TRNFR-19 Protein |
| 23t | 174104491 | 151 | 152 | TRNFR-19 Protein |
| 23u | CG57774-02 | 153 | 154 | TRNFR-19 Protein |
| 23v | CG57774-03 | 155 | 156 | TRNFR-19 Protein |
| 23w | CG57774-04 | 157 | 158 | TRNFR-19 Protein |
| 23x | CG57774-05 | 159 | 160 | TRNFR-19 Protein |
| 23y | CG57774-06 | 161 | 162 | TRNFR-19 Protein |
| 23z | CG57774-07 | 163 | 164 | TRNFR-19 Protein |
| 23aa | CG57774-08 | 165 | 166 | TRNFR-19 Protein |
| 23ab | CG57774-09 | 167 | 168 | TRNFR-19 Protein |
| 23ac | CG57774-10 | 169 | 170 | TRNFR-19 Protein |
| 23ad | CG57774-11 | 171 | 172 | TRNFR-19 Protein |
| 23ae | CG57774-12 | 173 | 174 | TRNFR-19 Protein |
| 23af | CG57774-13 | 175 | 176 | TRNFR-19 Protein |
| 24a | CG89285-01 | 177 | 178 | Alpha-1-Antichymotrypsin- |
| | | | | like |
| 24b | CG89285-04 | 179 | 180 | Alpha-1-Antichymotrypsin- |
| | | | | like |
| 24c | CG89285-03 | 181 | 182 | Alpha-1-Antichymotrypsin- |
| | | | | like |
| 24d | 306418132 | 183 | 184 | Alpha-1-Antichymotrypsin- |
| | | | | like |
| 24e | CG89285-02 | 185 | 186 | Alpha-1-Antichymotrypsin- |
| | | | | like |
| 25a | CG57094-01 | 187 | 188 | Human angiopoietin-like |
| 25b | 170075926 | 189 | 190 | Human angiopoietin-like |
| 25c | 164225601 | 191 | 192 | Human angiopoietin-like |
| 25d | 164225637 | 193 | 194 | Human angiopoietin-like |
| 25e | 170075926 | 195 | 196 | Human angiopoietin-like |
| 25f | 254120574 | 197 | 198 | Human angiopoietin-like |
| 25g | 254156650 | 199 | 200 | Human angiopoietin-like |
| 25h | 254500366 | 201 | 202 | Human angiopoietin-like |
| 25i | 226679956 | 203 | 204 | Human angiopoietin-like |
| 25j | 254500319 | 205 | 206 | Human angiopoietin-like |
| 25k | 254500445 | 207 | 208 | Human angiopoietin-like |
| 25l | 248210290 | 209 | 210 | Human angiopoietin-like |
| 25m | 252514148 | 211 | 212 | Human angiopoietin-like |
| 25n | 252514189 | 213 | 214 | Human angiopoietin-like |
| 25o | 252514198 | 215 | 216 | Human angiopoietin-like |
| 25p | 252514202 | 217 | 218 | Human angiopoietin-like |
| 25q | 228039766 | 219 | 220 | Human angiopoietin-like |
| 25r | 226679952 | 221 | 222 | Human angiopoietin-like |
| 25s | CG57094-02 | 223 | 224 | Human angiopoietin-like |
| 25t | CG57094-03 | 225 | 226 | Human angiopoietin-like |
| 25u | CG57094-04 | 227 | 228 | Human angiopoietin-like |
| 25v | CG57094-05 | 229 | 230 | Human angiopoietin-like |
| 25w | CG57094-06 | 231 | 232 | Human angiopoietin-like |
| 25x | CG57094-07 | 233 | 234 | Human angiopoietin-like |
| 25y | CG57094-08 | 235 | 236 | Human angiopoietin-like |
| 25z | CG57094-09 | 237 | 238 | Human angiopoietin-like |
| 25aa | CG57094-10 | 239 | 240 | Human angiopoietin-like |
| 25ab | CG57094-11 | 241 | 242 | Human angiopoietin-like |
| 25ac | CG57094-12 | 243 | 244 | Human angiopoietin-like |
| 25ad | CG57094-13 | 245 | 246 | Human angiopoietin-like |
| 26a | CG51523-05 | 247 | 248 | Endozepine Related |
| | | | | Protein |
| | | | | Precursor-like |
| 26b | CG51523-05_{—} | 249 | 250 | Endozepine Related |
| | 164786042 | | | Protein |
| | | | | Precursor-like |
| 26c | CG51523-05_{—} | 251 | 252 | Endozepine Related |
| | 164732479 | | | Protein |
| | | | | Precursor-like |
| 26d | CG51523-05_{—} | 253 | 254 | Endozepine Related |
| | 164732506 | | | Protein |
| | | | | Precursor-like |
| 26e | CG51523-05_{—} | 255 | 256 | Endozepine Related |
| | 164732693 | | | Protein |
| | | | | Precursor-like |
| 26f | CG51523-05_{—} | 257 | 258 | Endozepine Related |
| | 164732709 | | | Protein |
| | | | | Precursor-like |
| 26g | CG51523-05_{—} | 259 | 260 | Endozepine Related |
| | 164718189 | | | Protein |
| | | | | Precursor-like |
| 26h | CG51523-05_{—} | 261 | 262 | Endozepine Related |
| | 164718193 | | | Protein |
| | | | | Precursor-like |
| 26i | CG51523-05_{—} | 263 | 264 | Endozepine Related |
| | 164718197 | | | Protein |
| | | | | Precursor-like |
| 26j | CG51523-05_{—} | 265 | 266 | Endozepine Related |
| | 164718205 | | | Protein |
| | | | | Precursor-like |
| 26k | CG51523-05_{—} | 267 | 268 | Endozepine Related |
| | 164718209 | | | Protein |
| | | | | Precursor-like |
| 26l | CG51523-05_{—} | 269 | 270 | Endozepine Related |
| | 164718213 | | | Protein |
| | | | | Precursor-like |
| 26m | CG51523-05_{—} | 271 | 272 | Endozepine Related |
| | 166190452 | | | Protein |
| | | | | Precursor-like |
| 26n | CG51523-05_{—} | 273 | 274 | Endozepine Related |
| | 166190467 | | | Protein |
| | | | | Precursor-like |
| 26o | CG51523-05_{—} | 275 | 276 | Endozepine Related |
| | 166190475 | | | Protein |
| | | | | Precursor-like |
| 26p | CG51523-05_{—} | 277 | 278 | Endozepine Related |
| | 166190498 | | | Protein |
| | | | | Precursor-like |
| 26q | CG51523-05_{—} | 279 | 280 | Endozepine Related |
| | 166190460 | | | Protein |
| | | | | Precursor-like |
| 26r | CG51523-05_{—} | 281 | 282 | Endozepine Related |
| | 166190483 | | | Protein |
| | | | | Precursor-like |

[0038] Table A indicates the homology of NOVX polypeptides to known protein families. Thus, the nucleic acids and polypeptides, antibodies and related compounds according to the invention corresponding to a NOVX as identified in column 1 of Table A will be useful in therapeutic and diagnostic applications implicated in, for example, pathologies and disorders associated with the known protein families identified in column 5 of Table A.

[0039] Pathologies, diseases, disorders and condition and the like that are associated with NOVX sequences include, but are not limited to: e.,g. cardiomyopathy, atherosclerosis, hypertension, congenital heart defects, aortic stenosis atrial septal defect (ASD), atrioventricular (A-V) canal defect, ductus arteriosus, pulmonary stenosis, subaortic stenosis, ventricular septal defect (VSD), valve diseases, tuberous sclerosis, scleroderma, obesity metabolic disturbances associated with obesity, transplantation, adrenoleukodystrophy, congenital adrenal hyperplasia, prostate cancer, diabetes, metabolic disorders, neoplasm; adenocarcinoma, lymphoma, uterus cancer, fertility, hemophilia, hypercoagulation, idiopathic thrombocytopenic purpura, immunodeficiencies, graft versus host disease, AIDS, bronchial asthma, Crohn's disease; multiple sclerosis, treatment of Albright Hereditary Ostoeodystrophy, infectious disease, anorexia, cancer-associated cachexia, cancer, neurodegenerative disorders, Alzheimer's Disease, Parkinson's Disorder, immune disorders, hematopoietic disorders, and the various dyslipidemias,] the metabolic syndrome X and wasting disorders associated with chronic diseases and various cancers, as well as conditions such as transplantation, neuroprotection, fertility, or regeneration (in vitro and in vivo).]

[0040] NOVX nucleic acids and their encoded polypeptides are useful in a variety of applications and contexts. The various NOVX nucleic acids and polypeptides according to the invention are useful as novel members of the protein families according to the presence of domains and sequence relatedness to previously described proteins. Additionally, NOVX nucleic acids and polypeptides can also be used to identify proteins that are members of the family to which the NOVX polypeptides belong.

[0041] Consistent with other known members of the family of proteins, identified in column 5 of Table A, the NOVX polypeptides of the present invention show homology to, and contain domains that are characteristic of, other members of such protein families. Details of the sequence relatedness and domain analysis for each NOVX are presented in Example A.

[0042] The NOVX nucleic acids and polypeptides can also be used to screen for molecules, which inhibit or enhance NOVX activity or function. Specifically, the nucleic acids and polypeptides according to the invention may be used as targets for the identification of small molecules that modulate or inhibit diseases associated with the protein families listed in Table A.

[0043] The NOVX nucleic acids and polypeptides are also useful for detecting specific cell types. Details of the expression analysis for each NOVX are presented in Example C. Accordingly, the NOVX nucleic acids, polypeptides, antibodies and related compounds according to the invention will have diagnostic and therapeutic applications in the detection of a variety of diseases with differential expression in normal vs. diseased tissues, e.g. detection of a variety of cancers.

[0044] Additional utilities for NOVX nucleic acids and polypeptides according to the invention are disclosed herein.

[0045] NOVX Clones

[0046] NOVX nucleic acids and their encoded polypeptides are useful in a variety of applications and contexts. The various NOVX nucleic acids and polypeptides according to the invention are useful as novel members of the protein families according to the presence of domains and sequence relatedness to previously described proteins. Additionally, NOVX nucleic acids and polypeptides can also be used to identify proteins that are members of the family to which the NOVX polypeptides belong.

[0047] The NOVX genes and their corresponding encoded proteins are useful for preventing, treating or ameliorating medical conditions, e.g., by protein or gene therapy. Pathological conditions can be diagnosed by determining the amount of the new protein in a sample or by determining the presence of mutations in the new genes. Specific uses are described for each of the NOVX genes, based on the tissues in which they are most highly expressed. Uses include developing products for the diagnosis or treatment of a variety of diseases and disorders.

[0048] The NOVX nucleic acids and proteins of the invention are useful in potential diagnostic and therapeutic applications and as a research tool. These include serving as a specific or selective nucleic acid or protein diagnostic and/or prognostic marker, wherein the presence or amount of the nucleic acid or the protein are to be assessed, as well as potential therapeutic applications such as the following: (i) a protein therapeutic, (ii) a small molecule drug target, (iii) an antibody target (therapeutic, diagnostic, drug targeting/cytotoxic antibody), (iv) a nucleic acid useful in gene therapy (gene delivery/gene ablation), and (v) a composition promoting tissue regeneration in vitro and in vivo (vi) a biological defense weapon.

[0049] In one specific embodiment, the invention includes an isolated polypeptide comprising an amino acid sequence selected from the group consisting of: (a) a mature form of the amino acid sequence selected from the group consisting of SEQ ID NO: 2n, wherein n is an integer between 1 and 141; (b) a variant of a mature form of the amino acid sequence selected from the group consisting of SEQ ID NO: 2n, wherein n is an integer between 1 and 141, wherein any amino acid in the mature form is changed to a different amino acid, provided that no more than 15% of the amino acid residues in the sequence of the mature form are so changed; (c) an amino acid sequence selected from the group consisting of SEQ ID NO: 2n, wherein n is an integer between 1 and 141; (d) a variant of the amino acid sequence selected from the group consisting of SEQ ID NO:2n, wherein n is an integer between 1 and 141 wherein any amino acid specified in the chosen sequence is changed to a different amino acid, provided that no more than 15% of the amino acid residues in the sequence are so changed; and (e) a fragment of any of (a) through (d).

[0050] In another specific embodiment, the invention includes an isolated nucleic acid molecule comprising a nucleic acid sequence encoding a polypeptide comprising an amino acid sequence selected from the group consisting of: (a) a mature form of the amino acid sequence given SEQ ID NO: 2n, wherein n is an integer between 1 and 141; (b) a variant of a mature form of the amino acid sequence selected from the group consisting of SEQ ID NO: 2n, wherein n is an integer between 1 and 141 wherein any amino acid in the mature form of the chosen sequence is changed to a different amino acid, provided that no more than 15% of the amino acid residues in the sequence of the mature form are so changed; (c) the amino acid sequence selected from the group consisting of SEQ ID NO: 2n, wherein n is an integer between 1 and 141; (d) a variant of the amino acid sequence selected from the group consisting of SEQ ID NO: 2n, wherein n is an integer between 1 and 141, in which any amino acid specified in the chosen sequence is changed to a different amino acid, provided that no more than 15% of the amino acid residues in the sequence are so changed; (e) a nucleic acid fragment encoding at least a portion of a polypeptide comprising the amino acid sequence selected from the group consisting of SEQ ID NO: 2n, wherein n is an integer between 1 and 141 or any variant of said polypeptide wherein any amino acid of the chosen sequence is changed to a different amino acid, provided that no more than 10% of the amino acid residues in the sequence are so changed; and (f) the complement of any of said nucleic acid molecules.

[0051] In yet another specific embodiment, the invention includes an isolated nucleic acid molecule, wherein said nucleic acid molecule comprises a nucleotide sequence selected from the group consisting of: (a) the nucleotide sequence selected from the group consisting of SEQ ID NO: 2n−1, wherein n is an integer between 1 and 141; (b) a nucleotide sequence wherein one or more nucleotides in the nucleotide sequence selected from the group consisting of SEQ ID NO: 2n−1, wherein n is an integer between 1 and 141 is changed from that selected from the group consisting of the chosen sequence to a different nucleotide provided that no more than 15% of the nucleotides are so changed; (c) a nucleic acid fragment of the sequence selected from the group consisting of SEQ ID NO: 2n−1, wherein n is an integer between 1 and 141; and (d) a nucleic acid fragment wherein one or more nucleotides in the nucleotide sequence selected from the group consisting of SEQ ID NO: 2n- 1, wherein n is an integer between 1 and 141 is changed from that selected from the group consisting of the chosen sequence to a different nucleotide provided that no more than 15% of the nucleotides are so changed.

[0052] NOVX Nucleic Acids and Polypeptides

[0053] One aspect of the invention pertains to isolated nucleic acid molecules that encode NOVX polypeptides or biologically active portions thereof. Also included in the invention are nucleic acid fragments sufficient for use as hybridization probes to identify NOVX-encoding nucleic acids (e.g., NOVX mRNAs) and fragments for use as PCR primers for the amplification and/or mutation of NOVX nucleic acid molecules. As used herein, the term “nucleic acid molecule” is intended to include DNA molecules (e.g., cDNA or genomic DNA), RNA molecules (e.g., mRNA), analogs of the DNA or RNA generated using nucleotide analogs, and derivatives, fragments and homologs thereof. The nucleic acid molecule may be single-stranded or double-stranded, but preferably is comprised double-stranded DNA.

[0054] A NOVX nucleic acid can encode a mature NOVX polypeptide. As used herein, a “mature” form of a polypeptide or protein disclosed in the present invention is the product of a naturally occurring polypeptide or precursor form or proprotein. The naturally occurring polypeptide, precursor or proprotein includes, by way of nonlimiting example, the full-length gene product encoded by the corresponding gene. Alternatively, it may be defined as the polypeptide, precursor or proprotein encoded by an ORF described herein. The product “mature” form arises, by way of nonlimiting example, as a result of one or more naturally occurring processing steps that may take place within the cell (e.g., host cell) in which the gene product arises. Examples of such processing steps leading to a “mature” form of a polypeptide or protein include the cleavage of the N-terminal methionine residue encoded by the initiation codon of an ORF, or the proteolytic cleavage of a signal peptide or leader sequence. Thus a mature form arising from a precursor polypeptide or protein that has residues 1 to N, where residue 1 is the N-terminal methionine, would have residues 2 through N remaining after removal of the N-terminal methionine. Alternatively, a mature form arising from a precursor polypeptide or protein having residues 1 to N, in which an N-terminal signal sequence from residue 1 to residue M is cleaved, would have the residues from residue M+1 to residue N remaining. Further as used herein, a “mature” form of a polypeptide or protein may arise from a step of post-translational modification other than a proteolytic cleavage event. Such additional processes include, by way of non-limiting example, glycosylation, myristylation or phosphorylation. In general, a mature polypeptide or protein may result from the operation of only one of these processes, or a combination of any of them.

[0055] The term “probe”, as utilized herein, refers to nucleic acid sequences of variable length, preferably between at least about 10 nucleotides (nt), about 100 nt, or as many as approximately, e.g., 6,000 nt, depending upon the specific use. Probes are used in the detection of identical, similar, or complementary nucleic acid sequences. Longer length probes are generally obtained from a natural or recombinant source, are highly specific, and much slower to hybridize than shorter-length oligomer probes. Probes may be single-stranded or double-stranded and designed to have specificity in PCR, membrane-based hybridization technologies, or ELISA-like technologies.

[0056] The term “isolated” nucleic acid molecule, as used herein, is a nucleic acid that is separated from other nucleic acid molecules which are present in the natural source of the nucleic acid. Preferably, an “isolated” nucleic acid is free of sequences which naturally flank the nucleic acid (i.e., sequences located at the 5′- and 3′-termini of the nucleic acid) in the genomic DNA of the organism from which the nucleic acid is derived. For example, in various embodiments, the isolated NOVX nucleic acid molecules can contain less than about 5 kb, 4 kb, 3 kb, 2 kb, 1 kb, 0.5 kb or 0.1 kb of nucleotide sequences which naturally flank the nucleic acid molecule in genomic DNA of the cell/tissue from which the nucleic acid is derived (e.g., brain, heart, liver, spleen, etc.). Moreover, an “isolated” nucleic acid molecule, such as a cDNA molecule, can be substantially free of other cellular material, or culture medium, or of chemical precursors or other chemicals.

[0057] A nucleic acid molecule of the invention, e.g., a nucleic acid molecule having the nucleotide sequence of SEQ ID NO:2n−1, wherein n is an integer between 1 and 141, or a complement of this nucleotide sequence, can be isolated using standard molecular biology techniques and the sequence information provided herein. Using all or a portion of the nucleic acid sequence of SEQ ID NO:2n−1, wherein n is an integer between 1 and 141, as a hybridization probe, NOVX molecules can be isolated using standard hybridization and cloning techniques (e.g., as described in Sambrook, et al., (eds.), MOLECULAR CLONING: A LABORATORY MANUAL 2nd Ed., Cold Spring Harbor Laboratory Press, Cold Spring Harbor, N.Y., 1989; and Ausubel, et al., (eds.), CURRENT PROTOCOLS IN MOLECULAR BIOLOGY, John Wiley & Sons, New York, N.Y., 1993.)

[0058] A nucleic acid of the invention can be amplified using cDNA, mRNA or alternatively, genomic DNA, as a template with appropriate oligonucleotide primers according to standard PCR amplification techniques. The nucleic acid so amplified can be cloned into an appropriate vector and characterized by DNA sequence analysis. Furthermore, oligonucleotides corresponding to NOVX nucleotide sequences can be prepared by standard synthetic techniques, e.g., using an automated DNA synthesizer.

[0059] As used herein, the term “oligonucleotide” refers to a series of linked nucleotide residues. A short oligonucleotide sequence may be based on, or designed from, a genomic or cDNA sequence and is used to amplify, confirm, or reveal the presence of an identical, similar or complementary DNA or RNA in a particular cell or tissue. Oligonucleotides comprise a nucleic acid sequence having about 10 nt, 50 nt, or 100 nt in length, preferably about 15 nt to 30 nt in length. In one embodiment of the invention, an oligonucleotide comprising a nucleic acid molecule less than 100 nt in length would further comprise at least 6 contiguous nucleotides of SEQ ID NO:2n−1, wherein n is an integer between 1 and 141, or a complement thereof. Oligonucleotides may be chemically synthesized and may also be used as probes.

[0060] In another embodiment, an isolated nucleic acid molecule of the invention comprises a nucleic acid molecule that is a complement of the nucleotide sequence shown in SEQ ID NO:2n−1, wherein n is an integer between 1 and 141, or a portion of this nucleotide sequence (e.g., a fragment that can be used as a probe or primer or a fragment encoding a biologically-active portion of a NOVX polypeptide). A nucleic acid molecule that is complementary to the nucleotide sequence of SEQ ID NO:2n−1, wherein n is an integer between 1 and 141, is one that is sufficiently complementary to the nucleotide sequence of SEQ ID NO:2n−1, wherein n is an integer between 1 and 141, that it can hydrogen bond with few or no mismatches to the nucleotide sequence shown in SEQ ID NO:2n−1, wherein n is an integer between 1 and 141, thereby forming a stable duplex.

[0061] As used herein, the term “complementary” refers to Watson-Crick or Hoogsteen base pairing between nucleotides units of a nucleic acid molecule, and the term “binding” means the physical or chemical interaction between two polypeptides or compounds or associated polypeptides or compounds or combinations thereof. Binding includes ionic, non-ionic, van der Waals, hydrophobic interactions, and the like. A physical interaction can be either direct or indirect. Indirect interactions may be through or due to the effects of another polypeptide or compound. Direct binding refers to interactions that do not take place through, or due to, the effect of another polypeptide or compound, but instead are without other substantial chemical intermediates.

[0062] A “fragment” provided herein is defined as a sequence of at least 6 (contiguous) nucleic acids or at least 4 (contiguous) amino acids, a length sufficient to allow for specific hybridization in the case of nucleic acids or for specific recognition of an epitope in the case of amino acids, and is at most some portion less than a full length sequence. Fragments may be derived from any contiguous portion of a nucleic acid or amino acid sequence of choice.

[0063] A full-length NOVX clone is identified as containing an ATG translation start codon and an in-frame stop codon. Any disclosed NOVX nucleotide sequence lacking an ATG start codon therefore encodes a truncated C-terminal fragment of the respective NOVX polypeptide, and requires that the corresponding full-length cDNA extend in the 5′ direction of the disclosed sequence. Any disclosed NOVX nucleotide sequence lacking an in-frame stop codon similarly encodes a truncated N-terminal fragment of the respective NOVX polypeptide, and requires that the corresponding full-length cDNA extend in the 3′ direction of the disclosed sequence.

[0064] A “derivative” is a nucleic acid sequence or amino acid sequence formed from the native compounds either directly, by modification or partial substitution. An “analog” is a nucleic acid sequence or amino acid sequence that has a structure similar to, but not identical to, the native compound, e.g. they differs from it in respect to certain components or side chains. Analogs may be synthetic or derived from a different evolutionary origin and may have a similar or opposite metabolic activity compared to wild type. A “homolog” is a nucleic acid sequence or amino acid sequence of a particular gene that is derived from different species.

[0065] Derivatives and analogs may be full length or other than full length. Derivatives or analogs of the nucleic acids or proteins of the invention include, but are not limited to, molecules comprising regions that are substantially homologous to the nucleic acids or proteins of the invention, in various embodiments, by at least about 70%, 80%, or 95% identity (with a preferred identity of 80-95%) over a nucleic acid or amino acid sequence of identical size or when compared to an aligned sequence in which the alignment is done by a computer homology program known in the art, or whose encoding nucleic acid is capable of hybridizing to the complement of a sequence encoding the proteins under stringent, moderately stringent, or low stringent conditions. See e.g. Ausubel, et al., CURRENT PROTOCOLS IN MOLECULAR BIOLOGY, John Wiley & Sons, New York, N.Y., 1993, and below.

[0066] A “homologous nucleic acid sequence” or “homologous amino acid sequence,” or variations thereof, refer to sequences characterized by a homology at the nucleotide level or amino acid level as discussed above. Homologous nucleotide sequences include those sequences coding for isoforms of NOVX polypeptides. Isoforms can be expressed in different tissues of the same organism as a result of, for example, alternative splicing of RNA. Alternatively, isoforms can be encoded by different genes. In the invention, homologous nucleotide sequences include nucleotide sequences encoding for a NOVX polypeptide of species other than humans, including, but not limited to: vertebrates, and thus can include, e.g., frog, mouse, rat, rabbit, dog, cat cow, horse, and other organisms.

[0067] Homologous nucleotide sequences also include, but are not limited to, naturally occurring allelic variations and mutations of the nucleotide sequences set forth herein. A homologous nucleotide sequence does not, however, include the exact nucleotide sequence encoding human NOVX protein. Homologous nucleic acid sequences include those nucleic acid sequences that encode conservative amino acid substitutions (see below) in SEQ ID NO:2n−1, wherein n is an integer between 1 and 141, as well as a polypeptide possessing NOVX biological activity. Various biological activities of the NOVX proteins are described below.

[0068] A NOVX polypeptide is encoded by the open reading frame (“ORF”) of a NOVX nucleic acid. An ORF corresponds to a nucleotide sequence that could potentially be translated into a polypeptide. A stretch of nucleic acids comprising an ORF is uninterrupted by a stop codon. An ORF that represents the coding sequence for a full protein begins with an ATG “start” codon and terminates with one of the three “stop” codons, namely, TAA, TAG, or TGA. For the purposes of this invention, an ORF may be any part of a coding sequence, with or without a start codon, a stop codon, or both. For an ORF to be considered as a good candidate for coding for a bona fide cellular protein, a minimum size requirement is often set, e.g., a stretch of DNA that would encode a protein of 50 amino acids or more.

[0069] The nucleotide sequences determined from the cloning of the human NOVX genes allows for the generation of probes and primers designed for use in identifying and/or cloning NOVX homologues in other cell types, e.g. from other tissues, as well as NOVX homologues from other vertebrates. The probe/primer typically comprises substantially purified oligonucleotide. The oligonucleotide typically comprises a region of nucleotide sequence that hybridizes under stringent conditions to at least about 12, 25, 50, 100, 150, 200, 250, 300, 350 or 400 consecutive sense strand nucleotide sequence of SEQ ID NO:2n−1, wherein n is an integer between 1 and 141; or an anti-sense strand nucleotide sequence of SEQ ID NO:2n−1, wherein n is an integer between 1 and 141; or of a naturally occurring mutant of SEQ ID NO:2n−1, wherein n is an integer between 1 and 141.

[0070] Probes based on the human NOVX nucleotide sequences can be used to detect transcripts or genomic sequences encoding the same or homologous proteins. In various embodiments, the probe has a detectable label attached, e.g. the label can be a radioisotope, a fluorescent compound, an enzyme, or an enzyme co-factor. Such probes can be used as a part of a diagnostic test kit for identifying cells or tissues which mis-express a NOVX. protein, such as by measuring a level of a NOVX-encoding nucleic acid in a sample of cells from a subject e.g., detecting NOVX mRNA levels or determining whether a genomic NOVX gene has been mutated or deleted.

[0071] “A polypeptide having a biologically-active portion of a NOVX polypeptide” refers to polypeptides exhibiting activity similar, but not necessarily identical to, an activity of a polypeptide of the invention, including mature forms, as measured in a particular biological assay, with or without dose dependency. A nucleic acid fragment encoding a “biologically-active portion of NOVX” can be prepared by isolating a portion of SEQ ID NO:2n−1, wherein n is an integer between 1 and 141, that encodes a polypeptide having a NOVX biological activity (the biological activities of the NOVX proteins are described below), expressing the encoded portion of NOVX protein (e.g., by recombinant expression in vitro) and assessing the activity of the encoded portion of NOVX.

[0072] NOVX Nucleic Acid and Polypeptide Variants

[0073] The invention further encompasses nucleic acid molecules that differ from the nucleotide sequences of SEQ ID NO:2n−1, wherein n is an integer between 1 and 141, due to degeneracy of the genetic code and thus encode the same NOVX proteins as that encoded by the nucleotide sequences of SEQ ID NO:2n−1, wherein n is an integer between 1 and 141. In another embodiment, an isolated nucleic acid molecule of the invention has a nucleotide sequence encoding a protein having an amino acid sequence of SEQ ID NO:2n, wherein n is an integer between 1 and 141.

[0074] In addition to the human NOVX nucleotide sequences of SEQ ID NO:2n−1, wherein n is an integer between 1 and 141, it will be appreciated by those skilled in the art that DNA sequence polymorphisms that lead to changes in the amino acid sequences of the NOVX polypeptides may exist within a population (e.g., the human population). Such genetic polymorphism in the NOVX genes may exist among individuals within a population due to natural allelic variation. As used herein, the terms “gene” and “recombinant gene” refer to nucleic acid molecules comprising an open reading frame (ORF) encoding a NOVX protein, preferably a vertebrate NOVX protein. Such natural allelic variations can typically result in 1-5% variance in the nucleotide sequence of the NOVX genes. Any and all such nucleotide variations and resulting amino acid polymorphisms in the NOVX polypeptides, which are the result of natural allelic variation and that do not alter the functional activity of the NOVX polypeptides, are intended to be within the scope of the invention.

[0075] Moreover, nucleic acid molecules encoding NOVX proteins from other species, and thus that have a nucleotide sequence that differs from a human SEQ ID NO: 2n−1, wherein n is an integer between 1 and 141, are intended to be within the scope of the invention. Nucleic acid molecules corresponding to natural allelic variants and homologues of the NOVX cDNAs of the invention can be isolated based on their homology to the human NOVX nucleic acids disclosed herein using the human cDNAs, or a portion thereof, as a hybridization probe according to standard hybridization techniques under stringent hybridization conditions.

[0076] Accordingly, in another embodiment, an isolated nucleic acid molecule of the invention is at least 6 nucleotides in length and hybridizes under stringent conditions to the nucleic acid molecule comprising the nucleotide sequence of SEQ ID NO:2n−1, wherein n is an integer between 1 and 141. In another embodiment, the nucleic acid is at least 10, 25, 50, 100, 250, 500, 750, 1000, 1500, or 2000 or more nucleotides in length. In yet another embodiment, an isolated nucleic acid molecule of the invention hybridizes to the coding region. As used herein, the term “hybridizes under stringent conditions” is intended to describe conditions for hybridization and washing under which nucleotide sequences at least about 65% homologous to each other typically remain hybridized to each other.

[0077] Homologs (i.e., nucleic acids encoding NOVX proteins derived from species other than human) or other related sequences (e.g., paralogs) can be obtained by low, moderate or high stringency hybridization with all or a portion of the particular human sequence as a probe using methods well known in the art for nucleic acid hybridization and cloning.

[0078] As used herein, the phrase “stringent hybridization conditions” refers to conditions under which a probe, primer or oligonucleotide will hybridize to its target sequence, but to no other sequences. Stringent conditions are sequence-dependent and will be different in different circumstances. Longer sequences hybridize specifically at higher temperatures than shorter sequences. Generally, stringent conditions are selected to be about 5° C. lower than the thermal melting point (Tm) for the specific sequence at a defined ionic strength and pH. The Tm is the temperature (under defined ionic strength, pH and nucleic acid concentration) at which 50% of the probes complementary to the target sequence hybridize to the target sequence at equilibrium. Since the target sequences are generally present at excess, at Tm, 50% of the probes are occupied at equilibrium. Typically, stringent conditions will be those in which the salt concentration is less than about 1.0 M sodium ion, typically about 0.01 to 1.0 M sodium ion (or other salts) at pH 7.0 to 8.3 and the temperature is at least about 30° C. for short probes, primers or oligonucleotides (e.g., 10 nt to 50 nt) and at least about 60° C. for longer probes, primers and oligonucleotides. Stringent conditions may also be achieved with the addition of destabilizing agents, such as formamide.

[0079] Stringent conditions are known to those skilled in the art and can be found in Ausubel, et al., (eds.), CURRENT PROTOCOLS IN MOLECULAR BIOLOGY, John Wiley & Sons, N.Y. (1989), 6.3.1-6.3.6. Preferably, the conditions are such that sequences at least about 65%, 70%, 75%, 85%, 90%, 95%, 98%, or 99% homologous to each other typically remain hybridized to each other. A non-limiting example of stringent hybridization conditions are hybridization in a high salt buffer comprising 6× SSC, 50 mM Tris-HCl (pH 7.5), 1 mM EDTA, 0.02% PVP, 0.02% Ficoll, 0.02% BSA, and 500 mg/ml denatured salmon sperm DNA at 65° C., followed by one or more washes in 0.2× SSC, 0.01% BSA at 50° C. An isolated nucleic acid molecule of the invention that hybridizes under stringent conditions to a sequence of SEQ ID NO:2n−1, wherein n is an integer between 1 and 141, corresponds to a naturally-occurring nucleic acid molecule. As used herein, a “naturally-occurring” nucleic acid molecule refers to an RNA or DNA molecule having a nucleotide sequence that occurs in nature (e.g., encodes a natural protein).

[0080] In a second embodiment, a nucleic acid sequence that is hybridizable to the nucleic acid molecule comprising the nucleotide sequence of SEQ ID NO:2n−1, wherein n is an integer between 1 and 141, or fragments, analogs or derivatives thereof, under conditions of moderate stringency is provided. A non-limiting example of moderate stringency hybridization conditions are hybridization in 6× SSC, 5× Reinhardt's solution, 0.5% SDS and 100 mg/ml denatured salmon sperm DNA at 55° C., followed by one or more washes in 1× SSC, 0.1% SDS at 37° C. Other conditions of moderate stringency that may be used are well-known within the art. See, e.g., Ausubel, et aL (eds.), 1993, CURRENT PROTOCOLS IN MOLECULAR BIOLOGY, John Wiley & Sons, NY, and Krieger, 1990; GENE TRANSFER AND EXPRESSION, A LABORATORY MANUAL, Stockton Press, NY.

[0081] In a third embodiment, a nucleic acid that is hybridizable to the nucleic acid molecule comprising the nucleotide sequences of SEQ ID NO:2n−1, wherein n is an integer between 1 and 141, or fragments, analogs or derivatives thereof, under conditions of low stringency, is provided. A non-limiting example of low stringency hybridization conditions are hybridization in 35% formamide, 5× SSC, 50 mM Tris-HCl (pH 7.5), 5 mM EDTA, 0.02% PVP, 0.02% Ficoll, 0.2% BSA, 100 mg/ml denatured salmon sperm DNA, 10% (wt/vol) dextran sulfate at 40° C., followed by one or more washes in 2× SSC, 25 mM Tris-HCl (pH 7.4), 5 mM EDTA, and 0.1% SDS at 50° C. Other conditions of low stringency that may be used are well known in the art (e.g., as employed for cross-species hybridizations). See, e.g., Ausubel, et al. (eds.), 1993, CURRENT PROTOCOLS IN MOLECULAR BIOLOGY, John Wiley & Sons, NY, and Kriegler, 1990, GENE TRANSFER AND EXPRESSION, A LABORATORY MANUAL, Stockton Press, NY; Shilo and Weinberg, 1981. Proc Natl Acad Sci USA 78: 6789-6792.

[0082] Conservative Mutations

[0083] In addition to naturally-occurring allelic variants of NOVX sequences that may exist in the population, the skilled artisan will further appreciate that changes can be introduced by mutation into the nucleotide sequences of SEQ ID NO:2n−1, wherein n is an integer between 1 and 141, thereby leading to changes in the amino acid sequences of the encoded NOVX protein, without altering the functional ability of that NOVX protein. For example, nucleotide substitutions leading to amino acid substitutions at “non-essential” amino acid residues can be made in the sequence of SEQ ID NO:2n, wherein n is an integer between 1 and 141. A “non-essential” amino acid residue is a residue that can be altered from the wild-type sequences of the NOVX proteins without altering their biological activity, whereas an “essential” amino acid residue is required for such biological activity. For example, amino acid residues that are conserved among the NOVX proteins of the invention are predicted to be particularly non-amenable to alteration. Amino acids for which conservative substitutions can be made are well-known within the art.

[0084] Another aspect of the invention pertains to nucleic acid molecules encoding NOVX proteins that contain changes in amino acid residues that are not essential for activity. Such NOVX proteins differ in amino acid sequence from SEQ ID NO:2n−1, wherein n is an integer between 1 and 141, yet retain biological activity. In one embodiment, the isolated nucleic acid molecule comprises a nucleotide sequence encoding a protein, wherein the protein comprises an amino acid sequence at least about 40% homologous to the amino acid sequences of SEQ ID NO:2n, wherein n is an integer between 1 and 141. Preferably, the protein encoded by the nucleic acid molecule is at least about 60% homologous to SEQ ID NO:2n, wherein n is an integer between 1 and 141; more preferably at least about 70% homologous to SEQ ID NO:2n, wherein n is an integer between 1 and 141; still more preferably at least about 80% homologous to SEQ ID NO:2n, wherein n is an integer between 1 and 141; even more preferably at least about 90% homologous to SEQ ID NO:2n, wherein n is an integer between 1 and 141; and most preferably at least about 95% homologous to SEQ ID NO:2n, wherein n is an integer between 1 and 141.

[0085] An isolated nucleic acid molecule encoding a NOVX protein homologous to the protein of SEQ ID NO:2n, wherein n is an integer between 1 and 141, can be created by introducing one or more nucleotide substitutions, additions or deletions into the nucleotide sequence of SEQ ID NO:2n−1, wherein n is an integer between 1 and 141, such that one or more amino acid substitutions, additions or deletions are introduced into the encoded protein.

[0086] Mutations can be introduced any one of SEQ ID NO:2n−1, wherein n is an integer between 1 and 141, by standard techniques, such as site-directed mutagenesis and PCR-mediated mutagenesis. Preferably, conservative amino acid substitutions are made at one or more predicted, non-essential amino acid residues. A “conservative amino acid substitution” is one in which the amino acid residue is replaced with an amino acid residue having a similar side chain. Families of amino acid residues having similar side chains have been defined within the art. These families include amino acids with basic side chains (e.g., lysine, arginine, histidine), acidic side chains (e.g., aspartic acid, glutamic acid), uncharged polar side chains (e.g., glycine, asparagine, glutamine, serine, threonine, tyrosine, cysteine), nonpolar side chains (e.g., alanine, valine, leucine, isoleucine, proline, phenylalanine, methionine, tryptophan), beta-branched side chains (e.g., threonine, valine, isoleucine) and aromatic side chains (e.g., tyrosine, phenylalanine, tryptophan, histidine). Thus, a predicted non-essential amino acid residue in the NOVX protein is replaced with another amino acid residue from the same side chain family. Alternatively, in another embodiment, mutations can be introduced randomly along all or part of a NOVX coding sequence, such as by saturation mutagenesis, and the resultant mutants can be screened for NOVX biological activity to identify mutants that retain activity. Following mutagenesis of a nucleic acid of SEQ ID NO:2n−1, wherein n is an integer between 1 and 141, the encoded protein can be expressed by any recombinant technology known in the art and the activity of the protein can be determined.

[0087] The relatedness of amino acid families may also be determined based on side chain interactions. Substituted amino acids may be fully conserved “strong” residues or fully conserved “weak” residues. The “strong” group of conserved amino acid residues may be any one of the following groups: STA, NEQK, NHQK, NDEQ, QHRK, MILV, MILF, HY, FYW, wherein the single letter amino acid codes are grouped by those amino acids that may be substituted for each other. Likewise, the “weak” group of conserved residues may be any one of the following: CSA, ATV, SAG, STNK, STPA, SGND, SNDEQK, NDEQHK, NEQHRK, HFY, wherein the letters within each group represent the single letter amino acid code.

[0088] In one embodiment, a mutant NOVX protein can be assayed for (i) the ability to form protein:protein interactions with other NOVX proteins, other cell-surface proteins, or biologically-active portions thereof, (ii) complex formation between a mutant NOVX protein and a NOVX ligand; or (iii) the ability of a mutant NOVX protein to bind to an intracellular target protein or biologically-active portion thereof; (e.g. avidin proteins).

[0089] In yet another embodiment, a mutant NOVX protein can be assayed for the ability to regulate a specific biological function (e.g., regulation of insulin release).

[0090] Interfering RNA

[0091] In one aspect of the invention, NOVX gene expression can be attenuated by RNA interference. One approach well-known in the art is short interfering RNA (siRNA) mediated gene silencing where expression products of a NOVX gene are targeted by specific double stranded NOVX derived siRNA nucleotide sequences that are complementary to at least a 19-25 nt long segment of the NOVX gene transcript, including the 5′ untranslated (UT) region, the ORF, or the 3′ UT region. See, e.g., PCT applications WO00/44895, WO99/32619, WO01/75164, WO01/92513, WO01/29058, WO01/89304, WO02/16620, and WO02/29858, each incorporated by reference herein in their entirety. Targeted genes can be a NOVX gene, or an upstream or downstream modulator of the NOVX gene. Nonlimiting examples of upstream or downstream modulators of a NOVX gene include, e.g., a transcription factor that binds the NOVX gene promoter, a kinase or phosphatase that interacts with a NOVX polypeptide, and polypeptides involved in a NOVX regulatory pathway.

[0092] According to the methods of the present invention, NOVX gene expression is silenced using short interfering RNA. A NOVX polynucleotide according to the invention includes a siRNA polynucleotide. Such a NOVX siRNA can be obtained using a NOVX polynucleotide sequence, for example, by processing the NOVX ribopolynucleotide sequence in a cell-free system, such as but not limited to a Drosophila extract, or by transcription of recombinant double stranded NOVX RNA or by chemical synthesis of nucleotide sequences homologous to a NOVX sequence. See, e.g., Tuschl, Zamore, Lehmann, Bartel and Sharp (1999), Genes & Dev. 13: 3191-3197, incorporated herein by reference in its entirety. When synthesized, a typical 0.2 micromolar-scale RNA synthesis provides about 1 milligram of siRNA, which is sufficient for 1000 transfection experiments using a 24-well tissue culture plate format.

[0093] The most efficient silencing is generally observed with siRNA duplexes composed of a 21-nt sense strand and a 21-nt antisense strand, paired in a manner to have a 2-nt 3′ overhang. The sequence of the 2-nt 3′ overhang makes an additional small contribution to the specificity of siRNA target recognition. The contribution to specificity is localized to the unpaired nucleotide adjacent to the first paired bases. In one embodiment, the nucleotides in the 3′ overhang are ribonucleotides. In an alternative embodiment, the nucleotides in the 3′ overhang are deoxyribonucleotides. Using 2′-deoxyribonucleotides in the 3′ overhangs is as efficient as using ribonucleotides, but deoxyribonucleotides are often cheaper to synthesize and are most likely more nuclease resistant.

[0094] A contemplated recombinant expression vector of the invention comprises a NOVX DNA molecule cloned into an expression vector comprising operatively-linked regulatory sequences flanking the NOVX sequence in a manner that allows for expression (by transcription of the DNA molecule) of both strands. An RNA molecule that is antisense to NOVX mRNA is transcribed by a first promoter (e.g., a promoter sequence 3′ of the cloned DNA) and an RNA molecule that is the sense strand for the NOVX mRNA is transcribed by a second promoter (e.g., a promoter sequence 5′ of the cloned DNA). The sense and antisense strands may hybridize in vivo to generate siRNA constructs for silencing of the NOVX gene. Alternatively, two constructs can be utilized to create the sense and anti-sense strands of a siRNA construct. Finally, cloned DNA can encode a construct having secondary structure, wherein a single transcript has both the sense and complementary antisense sequences from the target gene or genes. In an example of this embodiment, a hairpin RNAi product is homologous to all or a portion of the target gene. In another example, a hairpin RNAi product is a siRNA. The regulatory sequences flanking the NOVX sequence may be identical or may be different, such that their expression may be modulated independently, or in a temporal or spatial manner.

[0095] In a specific embodiment, siRNAs are transcribed intracellularly by cloning the NOVX gene templates into a vector containing, e.g., a RNA pol III transcription unit from the smaller nuclear RNA (snRNA) U6 or the human RNase P RNA H1. One example of a vector system is the GeneSuppressor™ RNA Interference kit (commercially available from Imgenex). The U6 and H1 promoters are members of the type III class of Pol III promoters. The +1 nucleotide of the U6-like promoters is always guanosine, whereas the +1 for H1 promoters is adenosine. The termination signal for these promoters is defined by five consecutive thymidines. The transcript is typically cleaved after the second uridine. Cleavage at this position generates a 3′ UU overhang in the expressed siRNA, which is similar to the 3′ overhangs of synthetic siRNAs. Any sequence less than 400 nucleotides in length can be transcribed by these promoter, therefore they are ideally suited for the expression of around 21-nucleotide siRNAs in, e.g., an approximately 50-nucleotide RNA stem-loop transcript.

[0096] A siRNA vector appears to have an advantage over synthetic siRNAs where long term knock-down of expression is desired. Cells transfected with a siRNA expression vector would experience steady, long-term mRNA inhibition. In contrast, cells transfected with exogenous synthetic siRNAs typically recover from mRNA suppression within seven days or ten rounds of cell division. The long-term gene silencing ability of siRNA expression vectors may provide for applications in gene therapy.

[0097] In general, siRNAs are chopped from longer dsRNA by an ATP-dependent ribonuclease called DICER. DICER is a member of the RNase III family of double-stranded RNA-specific endonucleases. The siRNAs assemble with cellular proteins into an endonuclease complex. In vitro studies in Drosophila suggest that the siRNAs/protein complex (siRNP) is then transferred to a second enzyme complex, called an RNA-induced silencing complex (RISC), which contains an endoribonuclease that is distinct from DICER. RISC uses the sequence encoded by the antisense siRNA strand to find and destroy mRNAs of complementary sequence. The siRNA thus acts as a guide, restricting the ribonuclease to cleave only mRNAs complementary to one of the two siRNA strands.

[0098] A NOVX mRNA region to be targeted by siRNA is generally selected from a desired NOVX sequence beginning 50 to 100 nt downstream of the start codon. Alternatively, 5′ or 3′ UTRs and regions nearby the start codon can be used but are generally avoided, as these may be richer in regulatory protein binding sites. UTR-binding proteins and/or translation initiation complexes may interfere with binding of the siRNP or RISC endonuclease complex. An initial BLAST homology search for the selected siRNA sequence is done against an available nucleotide sequence library to ensure that only one gene is targeted. Specificity of target recognition by siRNA duplexes indicate that a single point mutation located in the paired region of an siRNA duplex is sufficient to abolish target mRNA degradation. See, Elbashir et al. 2001 EMBO J. 20(23):6877-88. Hence, consideration should be taken to accommodate SNPs, polymorphisms, allelic variants or species-specific variations when targeting a desired gene.

[0099] In one embodiment, a complete NOVX siRNA experiment includes the proper negative control. A negative control siRNA generally has the same nucleotide composition as the NOVX siRNA but lack significant sequence homology to the genome. Typically, one would scramble the nucleotide sequence of the NOVX siRNA and do a homology search to make sure it lacks homology to any other gene.

[0100] Two independent NOVX siRNA duplexes can be used to knock-down a target NOVX gene. This helps to control for specificity of the silencing effect. In addition, expression of two independent genes can be simultaneously knocked down by using equal concentrations of different NOVX siRNA duplexes, e.g., a NOVX siRNA and an siRNA for a regulator of a NOVX gene or polypeptide. Availability of siRNA-associating proteins is believed to be more limiting than target mRNA accessibility.

[0101] A targeted NOVX region is typically a sequence of two adenines (AA) and two thymidines (TT) divided by a spacer region of nineteen (N19) residues (e.g., AA(N19)TT). A desirable spacer region has a G/C-content of approximately 30% to 70%, and more preferably of about 50%. If the sequence AA(N19)TT is not present in the target sequence, an alternative target region would be AA(N21). The sequence of the NOVX sense siRNA corresponds to (N19)TT or N21, respectively. In the latter case, conversion of the 3′ end of the sense siRNA to TT can be performed if such a sequence does not naturally occur in the NOVX polynucleotide. The rationale for this sequence conversion is to generate a symmetric duplex with respect to the sequence composition of the sense and antisense 3′ overhangs. Symmetric 3′ overhangs may help to ensure that the siRNPs are formed with approximately equal ratios of sense and antisense target RNA-cleaving siRNPs. See, e.g., Elbashir, Lendeckel and Tuschl (2001). Genes & Dev. 15: 188-200, incorporated by reference herein in its entirely. The modification of the overhang of the sense sequence of the siRNA duplex is not expected to affect targeted mRNA recognition, as the antisense siRNA strand guides target recognition.

[0102] Alternatively, if the NOVX target mRNA does not contain a suitable AA(N21) sequence, one may search for the sequence NA(N21). Further, the sequence of the sense strand and antisense strand may still be synthesized as 5′ (N19)TT, as it is believed that the sequence of the 3′-most nucleotide of the antisense siRNA does not contribute to specificity. Unlike antisense or ribozyme technology, the secondary structure of the target mRNA does not appear to have a strong effect on silencing. See, Harborth, et al. (2001) J. Cell Science 114: 4557-4565, incorporated by reference in its entirety.

[0103] Transfection of NOVX siRNA duplexes can be achieved using standard nucleic acid transfection methods, for example, OLIGOFECTAMINE Reagent (commercially available from Invitrogen). An assay for NOVX gene silencing is generally performed approximately 2 days after transfection. No NOVX gene silencing has been observed in the absence of transfection reagent, allowing for a comparative analysis of the wild-type and silenced NOVX phenotypes. In a specific embodiment, for one well of a 24-well plate, approximately 0.84 μg of the siRNA duplex is generally sufficient. Cells are typically seeded the previous day, and are transfected at about 50% confluence. The choice of cell culture media and conditions are routine to those of skill in the art, and will vary with the choice of cell type. The efficiency of transfection may depend on the cell type, but also on the passage number and the confluency of the cells. The time and the manner of formation of siRNA-liposome complexes (e.g. inversion versus vortexing) are also critical. Low transfection efficiencies are the most frequent cause of unsuccessful NOVX silencing. The efficiency of transfection needs to be carefully examined for each new cell line to be used. Preferred cell are derived from a mammal, more preferably from a rodent such as a rat or mouse, and most preferably from a human. Where used for therapeutic treatment, the cells are preferentially autologous, although non-autologous cell sources are also contemplated as within the scope of the present invention.

[0104] For a control experiment, transfection of 0.84 μg single-stranded sense NOVX siRNA will have no effect on NOVX silencing, and 0.84 μg antisense siRNA has a weak silencing effect when compared to 0.84 μg of duplex siRNAs. Control experiments again allow for a comparative analysis of the wild-type and silenced NOVX phenotypes. To control for transfection efficiency, targeting of common proteins is typically performed, for example targeting of lamin A/C or transfection of a CMV-driven EGFP-expression plasmid (e.g. commercially available from Clontech). In the above example, a determination of the fraction of lamin A/C knockdown in cells is determined the next day by such techniques as immunofluorescence, Western blot, Northern blot or other similar assays for protein expression or gene expression. Lamin A/C monoclonal antibodies may be obtained from Santa Cruz Biotechnology.

[0105] Depending on the abundance and the half life (or turnover) of the targeted NOVX polynucleotide in a cell, a knock-down phenotype may become apparent after 1 to 3 days, or even later. In cases where no NOVX knock-down phenotype is observed, depletion of the NOVX polynucleotide may be observed by immunofluorescence or Western blotting. If the NOVX polynucleotide is still abundant after 3 days, cells need to be split and transferred to a fresh 24-well plate for re-transfection. If no knock-down of the targeted protein is observed, it may be desirable to analyze whether the target mRNA (NOVX or a NOVX upstream or downstream gene) was effectively destroyed by the transfected siRNA duplex. Two days after transfection, total RNA is prepared, reverse transcribed using a target-specific primer, and PCR-amplified with a primer pair covering at least one exon-exon junction in order to control for amplification of pre-mRNAs. RT/PCR of a non-targeted mRNA is also needed as control. Effective depletion of the mRNA yet undetectable reduction of target protein may indicate that a large reservoir of stable NOVX protein may exist in the cell. Multiple transfection in sufficiently long intervals may be necessary until the target protein is finally depleted to a point where a phenotype may become apparent. If multiple transfection steps are required, cells are split 2 to 3 days after transfection. The cells may be transfected immediately after splitting.

[0106] An inventive therapeutic method of the invention contemplates administering a NOVX siRNA construct as therapy to compensate for increased or aberrant NOVX expression or activity. The NOVX ribopolynucleotide is obtained and processed into siRNA fragments, or a NOVX siRNA is synthesized, as described above. The NOVX siRNA is administered to cells or tissues using known nucleic acid transfection techniques, as described above. A NOVX siRNA specific for a NOVX gene will decrease or knockdown NOVX transcription products, which will lead to reduced NOVX polypeptide production, resulting in reduced NOVX polypeptide activity in the cells or tissues.

[0107] The present invention also encompasses a method of treating a disease or condition associated with the presence of a NOVX protein in an individual comprising administering to the individual an RNAi construct that targets the mRNA of the protein (the mRNA that encodes the protein) for degradation. A specific RNAi construct includes a siRNA or a double stranded gene transcript that is processed into siRNAs. Upon treatment, the target protein is not produced or is not produced to the extent it would be in the absence of the treatment.

[0108] Where the NOVX gene function is not correlated with a known phenotype, a control sample of cells or tissues from healthy individuals provides a reference standard for determining NOVX expression levels. Expression levels are detected using the assays described, e.g., RT-PCR, Northern blotting, Western blotting, ELISA, and the like. A subject sample of cells or tissues is taken from a mammal, preferably a human subject, suffering from a disease state. The NOVX ribopolynucleotide is used to produce siRNA constructs, that are specific for the NOVX gene product. These cells or tissues are treated by administering NOVX siRNA's to the cells or tissues by methods described for the transfection of nucleic acids into a cell or tissue, and a change in NOVX polypeptide or polynucleotide expression is observed in the subject sample relative to the control sample, using the assays described. This NOVX gene knockdown approach provides a rapid method for determination of a NOVX minus (NOVX⁻) phenotype in the treated subject sample. The NOVX⁻ phenotype observed in the treated subject sample thus serves as a marker for monitoring the course of a disease state during treatment.

[0109] In specific embodiments, a NOVX siRNA is used in therapy. Methods for the generation and use of a NOVX siRNA are known to those skilled in the art. Example techniques are provided below.

[0110] Production of RNAs

[0111] Sense RNA (ssRNA) and antisense RNA (asRNA) of NOVX are produced using known methods such as transcription in RNA expression vectors. In the initial experiments, the sense and antisense RNA are about 500 bases in length each. The produced ssRNA and asRNA (0.5 μM) in 10 mM Tris-HCl (pH 7.5) with 20 mM NaCl were heated to 95° C. for 1 min then cooled and annealed at room temperature for 12 to 16 h. The RNAs are precipitated and resuspended in lysis buffer (below). To monitor annealing, RNAs are electrophoresed in a 2% agarose gel in TBE buffer and stained with ethidium bromide. See, e.g., Sambrook et al., Molecular Cloning. Cold Spring Harbor Laboratory Press, Plainview, N.Y. (1989).

[0112] Lysate Preparation

[0113] Untreated rabbit reticulocyte lysate (Ambion) are assembled according to the manufacturer's directions. dsRNA is incubated in the lysate at 30° C. for 10 min prior to the addition of mRNAs. Then NOVX mRNAs are added and the incubation continued for an additional 60 min. The molar ratio of double stranded RNA and mRNA is about 200:1. The NOVX mRNA is radiolabeled (using known techniques) and its stability is monitored by gel electrophoresis.

[0114] In a parallel experiment made with the same conditions, the double stranded RNA is internally radiolabeled with a ³²P-ATP. Reactions are stopped by the addition of 2× proteinase K buffer and deproteinized as described previously (Tuschl et al., Genes Dev., 13:3191-3197 (1999)). Products are analyzed by electrophoresis in 15% or 18% polyacrylamide sequencing gels using appropriate RNA standards. By monitoring the gels for radioactivity, the natural production of 10 to 25 nt RNAs from the double stranded RNA can be determined.

[0115] The band of double stranded RNA, about 21-23 bps, is eluded. The efficacy of these 21-23 mers for suppressing NOVX transcription is assayed in vitro using the same rabbit reticulocyte assay described above using 50 nanomolar of double stranded 21-23 mer for each assay. The sequence of these 21-23 mers is then determined using standard nucleic acid sequencing techniques.

[0116] RNA Preparation

[0117] 21 nt RNAs, based on the sequence determined above, are chemically synthesized using Expedite RNA phosphoramidites and thymidine phosphoramidite (Proligo, Germany). Synthetic oligonucleotides are deprotected and gel-purified (Elbashir, Lendeckel, & Tuschl, Genes & Dev. 15, 188-200 (2001)), followed by Sep-Pak C18 cartridge (Waters, Milford, Mass., USA) purification (Tuschl, et al., Biochemistry, 32:11658-11668 (1993)).

[0118] These RNAs (20 μM) single strands are incubated in annealing buffer (100 mM potassium acetate, 30 mM HEPES-KOH at pH 7.4, 2 mM magnesium acetate) for 1 min at 90° C. followed by 1 h at 37° C.

[0119] Cell Culture

[0120] A cell culture known in the art to regularly express NOVX is propagated using standard conditions. 24 hours before transfection, at approx. 80% confluency, the cells are trypsinized and diluted 1:5 with fresh medium without antibiotics (1-3×105 cells/ml) and transferred to 24-well plates (500 ml/well). Transfection is performed using a commercially available lipofection kit and NOVX expression is monitored using standard techniques with positive and negative control. A positive control is cells that naturally express NOVX while a negative control is cells that do not express NOVX. Base-paired 21 and 22 nt siRNAs with overhanging 3′ ends mediate efficient sequence-specific mRNA degradation in lysates and in cell culture. Different concentrations of siRNAs are used. An efficient concentration for suppression in vitro in mammalian culture is between 25 nM to 100 nM final concentration. This indicates that siRNAs are effective at concentrations that are several orders of magnitude below the concentrations applied in conventional antisense or ribozyme gene targeting experiments.

[0121] The above method provides a way both for the deduction of NOVX siRNA sequence and the use of such siRNA for in vitro suppression. In vivo suppression may be performed using the same siRNA using well known in vivo transfection or gene therapy transfection techniques.

[0122] Antisense Nucleic Acids

[0123] Another aspect of the invention pertains to isolated antisense nucleic acid molecules that are hybridizable to or complementary to the nucleic acid molecule comprising the nucleotide sequence of SEQ ID NO:2n−1, wherein n is an integer between 1 and 141, or fragments, analogs or derivatives thereof. An “antisense” nucleic acid comprises a nucleotide sequence that is complementary to a “sense” nucleic acid encoding a protein (e.g., complementary to the coding strand of a double-stranded cDNA molecule or complementary to an mRNA sequence). In specific aspects, antisense nucleic acid molecules are provided that comprise a sequence complementary to at least about 10, 25, 50, 100, 250 or 500 nucleotides or an entire NOVX coding strand, or to only a portion thereof. Nucleic acid molecules encoding fragments, homologs, derivatives and analogs of a NOVX protein of SEQ ID NO:2n, wherein n is an integer between 1 and 141, or antisense nucleic acids complementary to a NOVX nucleic acid sequence of SEQ ID NO:2n−1, wherein n is an integer between 1 and 141, are additionally provided.

[0124] In one embodiment, an antisense nucleic acid molecule is antisense to a “coding region” of the coding strand of a nucleotide sequence encoding a NOVX protein. The term “coding region” refers to the region of the nucleotide sequence comprising codons which are translated into amino acid residues. In another embodiment, the antisense nucleic acid molecule is antisense to a “noncoding region” of the coding strand of a nucleotide sequence encoding the NOVX protein. The term “noncoding region” refers to 5′ and 3′ sequences which flank the coding region that are not translated into amino acids (i.e., also referred to as 5′ and 3′ untranslated regions).

[0125] Given the coding strand sequences encoding the NOVX protein disclosed herein, antisense nucleic acids of the invention can be designed according to the rules of Watson and Crick or Hoogsteen base pairing. The antisense nucleic acid molecule can be complementary to the entire coding region of NOVX mRNA, but more preferably is an oligonucleotide that is antisense to only a portion of the coding or noncoding region of NOVX mRNA. For example, the antisense oligonucleotide can be complementary to the region surrounding the translation start site of NOVX mRNA. An antisense oligonucleotide can be, for example, about 5, 10, 15, 20, 25, 30, 35, 40, 45 or 50 nucleotides in length. An antisense nucleic acid of the invention can be constructed using chemical synthesis or enzymatic ligation reactions using procedures known in the art. For example, an antisense nucleic acid (e.g., an antisense oligonucleotide) can be chemically synthesized using naturally-occurring nucleotides or variously modified nucleotides designed to increase the biological stability of the molecules or to increase the physical stability of the duplex formed between the antisense and sense nucleic acids (e.g., phosphorothioate derivatives and acridine substituted nucleotides can be used).

[0126] Examples of modified nucleotides that can be used to generate the antisense nucleic acid include: 5-fluorouracil, 5-bromouracil, 5-chlorouracil, 5-iodouracil, hypoxanthine, xanthine, 4-acetylcytosine, 5-carboxymethylaminomethyl-2-thiouridine, 5-(carboxyhydroxylmethyl) uracil, 5-carboxymethylaminomethyluracil, dihydrouracil, beta-D-galactosylqueosine, inosine, N6-isopentenyladenine, 1-methylguanine, 1-methylinosine, 2,2-dimethylguanine, 2-methyladenine, 2-methylguanine, 5-methoxyuracil, 3-methylcytosine, 5-methylcytosine, N6-adenine, 7-methylguanine, 5-methylaminomethyluracil, 5-methoxyaminomethyl-2-thiouracil, 2-thiouracil, 4-thiouracil, beta-D-mannosylqueosine, 5′-methoxycarboxymethyluracil, 2-methylthio-N6-isopentenyladenine, uracil-5-oxyacetic acid (v), wybutoxosine, pseudouracil, queosine, 2-thiocytosine, 5-methyl-2-thiouracil, 5-methyluracil, uracil-5-oxyacetic acid methylester, uracil-5-oxyacetic acid (v), 5-methyl-2-thiouracil, 3-(3-amino-3-N-2-carboxypropyl) uracil, (acp3)w, and 2,6-diaminopurine. Alternatively, the antisense nucleic acid can be produced biologically using an expression vector into which a nucleic acid has been subcloned in an antisense orientation (i.e., RNA transcribed from the inserted nucleic acid will be of an antisense orientation to a target nucleic acid of interest, described further in the following subsection).

[0127] The antisense nucleic acid molecules of the invention are typically administered to a subject or generated in situ such that they hybridize with or bind to cellular mRNA and/or genomic DNA encoding a NOVX protein to thereby inhibit expression of the protein (e.g., by inhibiting transcription and/or translation). The hybridization can be by conventional nucleotide complementarity to form a stable duplex, or, for example, in the case of an antisense nucleic acid molecule that binds to DNA duplexes, through specific interactions in the major groove of the double helix. An example of a route of administration of antisense nucleic acid molecules of the invention includes direct injection at a tissue site. Alternatively, antisense nucleic acid molecules can be modified to target selected cells and then administered systemically. For example, for systemic administration, antisense molecules can be modified such that they specifically bind to receptors or antigens expressed on a selected cell surface (e.g., by linking the antisense nucleic acid molecules to peptides or antibodies that bind to cell surface receptors or antigens). The antisense nucleic acid molecules can also be delivered to cells using the vectors described herein. To achieve sufficient nucleic acid molecules, vector constructs in which the antisense nucleic acid molecule is placed under the control of a strong pol II or pol III promoter are preferred.

[0128] In yet another embodiment, the antisense nucleic acid molecule of the invention is an (α-anomeric nucleic acid molecule. An α-anomeric nucleic acid molecule forms specific double-stranded hybrids with complementary RNA in which, contrary to the usual β-units, the strands run parallel to each other. See, e.g., Gaultier, et al., 1987. Nucl. Acids Res. 15: 6625-6641. The antisense nucleic acid molecule can also comprise a 2′-o-methylribonucleotide (See, e.g., Inoue, et al. 1987. Nucl. Acids Res. 15: 6131-6148) or a chimeric RNA-DNA analogue (See, e.g., Inoue, et al., 1987. FEBS Lett. 215: 327-330.

[0129] Ribozymes and PNA Moieties

[0130] Nucleic acid modifications include, by way of non-limiting example, modified bases, and nucleic acids whose sugar phosphate backbones are modified or derivatized. These modifications are carried out at least in part to enhance the chemical stability of the modified nucleic acid, such that they may be used, for example, as antisense binding nucleic acids in therapeutic applications in a subject.

[0131] In one embodiment, an antisense nucleic acid of the invention is a ribozyme. Ribozymes are catalytic RNA molecules with ribonuclease activity that are capable of cleaving a single-stranded nucleic acid, such as an mRNA, to which they have a complementary region. Thus, ribozymes (e.g., hammerhead ribozymes as described in Haselhoff and Gerlach 1988. Nature 334: 585-591) can be used to catalytically cleave NOVX mRNA transcripts to thereby inhibit translation of NOVX mRNA. A ribozyme having specificity for a NOVX-encoding nucleic acid can be designed based upon the nucleotide sequence of a NOVX cDNA disclosed herein (i.e., SEQ ID NO:2n−1, wherein n is an integer between 1 and 141). For example, a derivative of a Tetrahymena L-19 IVS RNA can be constructed in which the nucleotide sequence of the active site is complementary to the nucleotide sequence to be cleaved in a NOVX-encoding mRNA. See, e.g., U.S. Pat. No. 4,987,071 to Cech, et al. and U.S. Pat. No. 5,116,742 to Cech, et al. NOVX mRNA can also be used to select a catalytic RNA having a specific ribonuclease activity from a pool of RNA molecules. See, e.g., Bartel et al., (1993) Science 261:1411-1418.

[0132] Alternatively, NOVX gene expression can be inhibited by targeting nucleotide sequences complementary to the regulatory region of the NOVX nucleic acid (e.g., the NOVX promoter and/or enhancers) to form triple helical structures that prevent transcription of the NOVX gene in target cells. See, e.g., Helene, 1991. Anticancer Drug Des. 6: 569-84; Helene, et al. 1992. Ann. N.Y. Acad. Sci. 660: 27-36; Maher, 1992. Bioassays 14: 807-15.

[0133] In various embodiments, the NOVX nucleic acids can be modified at the base moiety, sugar moiety or phosphate backbone to improve, e.g., the stability, hybridization, or solubility of the molecule. For example, the deoxyribose phosphate backbone of the nucleic acids can be modified to generate peptide nucleic acids. See, e.g., Hyrup, et al., 1996. Bioorg Med Chem 4: 5-23. As used herein, the terms “peptide nucleic acids” or “PNAs” refer to nucleic acid mimics (e.g., DNA mimics) in which the deoxyribose phosphate backbone is replaced by a pseudopeptide backbone and only the four natural nucleotide bases are retained. The neutral backbone of PNAs has been shown to allow for specific hybridization to DNA and RNA under conditions of low ionic strength. The synthesis of PNA oligomer can be performed using standard solid phase peptide synthesis protocols as described in Hyrup, et al., 1996. supra; Perry-O'Keefe, et al., 1996. Proc. Natl. Acad. Sci. USA 93: 14670-14675.

[0134] PNAs of NOVX can be used in therapeutic and diagnostic applications. For example, PNAs can be used as antisense or antigene agents for sequence-specific modulation of gene expression by, e.g., inducing transcription or translation arrest or inhibiting replication. PNAs of NOVX can also be used, for example, in the analysis of single base pair mutations in a gene (e.g., PNA directed PCR clamping; as artificial restriction enzymes when used in combination with other enzymes, e.g., S₁ nucleases (See, Hyrup, et al., 1996.supra); or as probes or primers for DNA sequence and hybridization (See, Hyrup, et al., 1996, supra; Perry-O'Keefe, et al., 1996. supra).

[0135] In another embodiment, PNAs of NOVX can be modified, e.g., to enhance their stability or cellular uptake, by attaching lipophilic or other helper groups to PNA, by the formation of PNA-DNA chimeras, or by the use of liposomes or other techniques of drug delivery known in the art. For example, PNA-DNA chimeras of NOVX can be generated that may combine the advantageous properties of PNA and DNA. Such chimeras allow DNA recognition enzymes (e.g., RNase H and DNA polymerases) to interact with the DNA portion while the PNA portion would provide high binding affinity and specificity. PNA-DNA chimeras can be linked using linkers of appropriate lengths selected in terms of base stacking, number of bonds between the nucleotide bases, and orientation (see, Hyrup, et al., 1996. supra). The synthesis of PNA-DNA chimeras can be performed as described in Hyrup, et al., 1996. supra and Finn, et al., 1996. Nucl Acids Res 24: 3357-3363. For example, a DNA chain can be synthesized on a solid support using standard phosphoramidite coupling chemistry, and modified nucleoside analogs, e.g., 5′-(4-methoxytrityl)amino-5′-deoxy-thymidine phosphoramidite, can be used between the PNA and the 5′ end of DNA. See, e.g., Mag, et al., 1989. Nucl Acid Res 17: 5973-5988. PNA monomers are then coupled in a stepwise manner to produce a chimeric molecule with a 5′ PNA segment and a 3′ DNA segment. See, e.g., Finn, et al., 1996. supra. Alternatively, chimeric molecules can be synthesized with a 5′ DNA segment and a 3′ PNA segment. See, e.g., Petersen, et al., 1975. Bioorg. Med. Chem. Lett. 5: 1119-11124.

[0136] In other embodiments, the oligonucleotide may include other appended groups such as peptides (e.g., for targeting host cell receptors in vivo), or agents facilitating transport across the cell membrane (see, e.g., Letsinger, et al., 1989. Proc. Natl. Acad. Sci. U.S.A. 86: 6553-6556; Lemaitre, et al., 1987. Proc. Natl. Acad. Sci. 84: 648-652; PCT Publication No. WO88/09810) or the blood-brain barrier (see, e.g., PCT Publication No. WO 89/10134). In addition, oligonucleotides can be modified with hybridization triggered cleavage agents (see, e.g., Krol, et al., 1988. BioTechniques 6:958-976) or intercalating agents (see, e.g., Zon, 1988. Pharm. Res. 5: 539-549). To this end, the oligonucleotide may be conjugated to another molecule, e.g., a peptide, a hybridization triggered cross-linking agent, a transport agent, a hybridization-triggered cleavage agent, and the like.

[0137] NOVX Polypeptides

[0138] A polypeptide according to the invention includes a polypeptide including the amino acid sequence of NOVX polypeptides whose sequences are provided in any one of SEQ ID NO:2n, wherein n is an integer between 1 and 141. The invention also includes a mutant or variant protein any of whose residues may be changed from the corresponding residues shown in any one of SEQ ID NO:2n, wherein n is an integer between 1 and 141, while still encoding a protein that maintains its NOVX activities and physiological functions, or a functional fragment thereof.

[0139] In general, a NOVX variant that preserves NOVX-like function includes any variant in which residues at a particular position in the sequence have been substituted by other amino acids, and further include the possibility of inserting an additional residue or residues between two residues of the parent protein as well as the possibility of deleting one or more residues from the parent sequence. Any amino acid substitution, insertion, or deletion is encompassed by the invention. In favorable circumstances, the substitution is a conservative substitution as defined above.

[0140] One aspect of the invention pertains to isolated NOVX proteins, and biologically-active portions thereof, or derivatives, fragments, analogs or homologs thereof. Also provided are polypeptide fragments suitable for use as immunogens to raise anti-NOVX antibodies. In one embodiment, native NOVX proteins can be isolated from cells or tissue sources by an appropriate purification scheme using standard protein purification techniques. In another embodiment, NOVX proteins are produced by recombinant DNA techniques. Alternative to recombinant expression, a NOVX protein or polypeptide can be synthesized chemically using standard peptide synthesis techniques.

[0141] An “isolated” or “purified” polypeptide or protein or biologically-active portion thereof is substantially free of cellular material or other contaminating proteins from the cell or tissue source from which the NOVX protein is derived, or substantially free from chemical precursors or other chemicals when chemically synthesized. The language “substantially free of cellular material” includes preparations of NOVX proteins in which the protein is separated from cellular components of the cells from which it is isolated or recombinantly-produced. In one embodiment, the language “substantially free of cellular material” includes preparations of NOVX proteins having less than about 30% (by dry weight) of non-NOVX proteins (also referred to herein as a “contaminating protein”), more preferably less than about 20% of non-NOVX proteins, still more preferably less than about 10% of non-NOVX proteins, and most preferably less than about 5% of non-NOVX proteins. When the NOVX protein or biologically-active portion thereof is recombinantly-produced, it is also preferably substantially free of culture medium, i.e., culture medium represents less than about 20%, more preferably less than about 10%, and most preferably less than about 5% of the volume of the NOVX protein preparation.

[0142] The language “substantially free of chemical precursors or other chemicals” includes preparations of NOVX proteins in which the protein is separated from chemical precursors or other chemicals that are involved in the synthesis of the protein. In one embodiment, the language “substantially free of chemical precursors or other chemicals” includes preparations of NOVX proteins having less than about 30% (by dry weight) of chemical precursors or non-NOVX chemicals, more preferably less than about 20% chemical precursors or non-NOVX chemicals, still more preferably less than about 10% chemical precursors or non-NOVX chemicals, and most preferably less than about 5% chemical precursors or non-NOVX chemicals.

[0143] Biologically-active portions of NOVX proteins include peptides comprising amino acid sequences sufficiently homologous to or derived from the amino acid sequences of the NOVX proteins (e.g., the amino acid sequence of SEQ ID NO:2n, wherein n is an integer between 1 and 141) that include fewer amino acids than the full-length NOVX proteins, and exhibit at least one activity of a NOVX protein. Typically, biologically-active portions comprise a domain or motif with at least one activity of the NOVX protein. A biologically-active portion of a NOVX protein can be a polypeptide which is, for example, 10, 25, 50, 100 or more amino acid residues in length.

[0144] Moreover, other biologically-active portions, in which other regions of the protein are deleted, can be prepared by recombinant techniques and evaluated for one or more of the functional activities of a native NOVX protein.

[0145] In an embodiment, the NOVX protein has an amino acid sequence of SEQ ID NO:2n, wherein n is an integer between 1 and 141. In other embodiments, the NOVX protein is substantially homologous to SEQ ID NO:2n, wherein n is an integer between 1 and 141, and retains the functional activity of the protein of SEQ ID NO:2n, wherein n is an integer between 1 and 141, yet differs in amino acid sequence due to natural allelic variation or mutagenesis, as described in detail, below. Accordingly, in another embodiment, the NOVX protein is a protein that comprises an amino acid sequence at least about 45% homologous to the amino acid sequence of SEQ ID NO:2n, wherein n is an integer between 1 and 141, and retains the functional activity of the NOVX proteins of SEQ ID NO:2n, wherein n is an integer between 1 and 141.

[0146] Determining Homology Between Two or More Sequences

[0147] To determine the percent homology of two amino acid sequences or of two nucleic acids, the sequences are aligned for optimal comparison purposes (e.g., gaps can be introduced in the sequence of a first amino acid or nucleic acid sequence for optimal alignment with a second amino or nucleic acid sequence). The amino acid residues or nucleotides at corresponding amino acid positions or nucleotide positions are then compared. When a position in the first sequence is occupied by the same amino acid residue or nucleotide as the corresponding position in the second sequence, then the molecules are homologous at that position (i.e., as used herein amino acid or nucleic acid “homology” is equivalent to amino acid or nucleic acid “identity”).

[0148] The nucleic acid sequence homology may be determined as the degree of identity between two sequences. The homology may be determined using computer programs known in the art, such as GAP software provided in the GCG program package. See, Needleman and Wunsch, 1970. J Mol Biol 48: 443-453. Using GCG GAP software with the following settings for nucleic acid sequence comparison: GAP creation penalty of 5.0 and GAP extension penalty of 0.3, the coding region of the analogous nucleic acid sequences referred to above exhibits a degree of identity preferably of at least 70%, 75%, 80%, 85%, 90%, 95%, 98%, or 99%, with the CDS (encoding) part of the DNA sequence of SEQ ID NO:2n−1, wherein n is an integer between 1 and 141.

[0149] The term “sequence identity” refers to the degree to which two polynucleotide or polypeptide sequences are identical on a residue-by-residue basis over a particular region of comparison. The term “percentage of sequence identity” is calculated by comparing two optimally aligned sequences over that region of comparison, determining the number of positions at which the identical nucleic acid base (e.g., A, T, C, G, U, or I, in the case of nucleic acids) occurs in both sequences to yield the number of matched positions, dividing the number of matched positions by the total number of positions in the region of comparison (i.e., the window size), and multiplying the result by 100 to yield the percentage of sequence identity. The term “substantial identity” as used herein denotes a characteristic of a polynucleotide sequence, wherein the polynucleotide comprises a sequence that has at least 80 percent sequence identity, preferably at least 85 percent identity and often 90 to 95 percent sequence identity, more usually at least 99 percent sequence identity as compared to a reference sequence over a comparison region.

[0150] Chimeric and Fusion Proteins

[0151] The invention also provides NOVX chimeric or fusion proteins. As used herein, a NOVX “chimeric protein” or “fusion protein” comprises a NOVX polypeptide operatively-linked to a non-NOVX polypeptide. An “NOVX polypeptide” refers to a polypeptide having an amino acid sequence corresponding to a NOVX protein of SEQ ID NO:2n, wherein n is an integer between 1 and 141, whereas a “non-NOVX polypeptide” refers to a polypeptide having an amino acid sequence corresponding to a protein that is not substantially homologous to the NOVX protein, e.g., a protein that is different from the NOVX protein and that is derived from the same or a different organism. Within a NOVX fusion protein the NOVX polypeptide can correspond to all or a portion of a NOVX protein. In one embodiment, a NOVX fusion protein comprises at least one biologically-active portion of a NOVX protein. In another embodiment, a NOVX fusion protein comprises at least two biologically-active portions of a NOVX protein. In yet another embodiment, a NOVX fusion protein comprises at least three biologically-active portions of a NOVX protein. Within the fusion protein, the term “operatively-linked” is intended to indicate that the NOVX polypeptide and the non-NOVX polypeptide are fused in-frame with one another. The non-NOVX polypeptide can be fused to the N-terminus or C-terminus of the NOVX polypeptide.

[0152] In one embodiment, the fusion protein is a GST-NOVX fusion protein in which the NOVX sequences are fused to the C-terminus of the GST (glutathione S-transferase) sequences. Such fusion proteins can facilitate the purification of recombinant NOVX polypeptides.

[0153] In another embodiment, the fusion protein is a NOVX protein containing a heterologous signal sequence at its N-terminus. In certain host cells (e.g., mammalian host cells), expression and/or secretion of NOVX can be increased through use of a heterologous signal sequence.

[0154] In yet another embodiment, the fusion protein is a NOVX-immunoglobulin fusion protein in which the NOVX sequences are fused to sequences derived from a member of the immunoglobulin protein family. The NOVX-immunoglobulin fusion proteins of the invention can be incorporated into pharmaceutical compositions and administered to a subject to inhibit an interaction between a NOVX ligand and a NOVX protein on the surface of a cell, to thereby suppress NOVX-mediated signal transduction in vivo. The NOVX-immunoglobulin fusion proteins can be used to affect the bioavailability of a NOVX cognate ligand. Inhibition of the NOVX ligand/NOVX interaction may be useful therapeutically for both the treatment of proliferative and differentiative disorders, as well as modulating (e.g. promoting or inhibiting) cell survival. Moreover, the NOVX-immunoglobulin fusion proteins of the invention can be used as immunogens to produce anti-NOVX antibodies in a subject, to purify NOVX ligands, and in screening assays to identify molecules that inhibit the interaction of NOVX with a NOVX ligand.

[0155] A NOVX chimeric or fusion protein of the invention can be produced by standard recombinant DNA techniques. For example, DNA fragments coding for the different polypeptide sequences are ligated together in-frame in accordance with conventional techniques, e.g., by employing blunt-ended or stagger-ended termini for ligation, restriction enzyme digestion to provide for appropriate termini, filling-in of cohesive ends as appropriate, alkaline phosphatase treatment to avoid undesirable joining, and enzymatic ligation. In another embodiment, the fusion gene can be synthesized by conventional techniques including automated DNA synthesizers. Alternatively, PCR amplification of gene fragments can be carried out using anchor primers that give rise to complementary overhangs between two consecutive gene fragments that can subsequently be annealed and reamplified to generate a chimeric gene sequence (see, e.g., Ausubel, et al. (eds.) CURRENT PROTOCOLS IN MOLECULAR BIOLOGY, John Wiley & Sons, 1992). Moreover, many expression vectors are commercially available that already encode a fusion moiety (e.g., a GST polypeptide). A NOVX-encoding nucleic acid can be cloned into such an expression vector such that the fusion moiety is linked in-frame to the NOVX protein.

[0156] NOVX Agonists and Antagonists

[0157] The invention also pertains to variants of the NOVX proteins that function as either NOVX agonists (i.e., mimetics) or as NOVX antagonists. Variants of the NOVX protein can be generated by mutagenesis (e.g., discrete point mutation or truncation of the NOVX protein). An agonist of the NOVX protein can retain substantially the same, or a subset of, the biological activities of the naturally occurring form of the NOVX protein. An antagonist of the NOVX protein can inhibit one or more of the activities of the naturally occurring form of the NOVX protein by, for example, competitively binding to a downstream or upstream member of a cellular signaling cascade which includes the NOVX protein. Thus, specific biological effects can be elicited by treatment with a variant of limited function. In one embodiment, treatment of a subject with a variant having a subset of the biological activities of the naturally occurring form of the protein has fewer side effects in a subject relative to treatment with the naturally occurring form of the NOVX proteins.

[0158] Variants of the NOVX proteins that function as either NOVX agonists (i.e., mimetics) or as NOVX antagonists can be identified by screening combinatorial libraries of mutants (e.g., truncation mutants) of the NOVX proteins for NOVX protein agonist or antagonist activity. In one embodiment, a variegated library of NOVX variants is generated by combinatorial mutagenesis at the nucleic acid level and is encoded by a variegated gene library. A variegated library of NOVX variants can be produced by, for example, enzymatically ligating a mixture of synthetic oligonucleotides into gene sequences such that a degenerate set of potential NOVX sequences is expressible as individual polypeptides, or alternatively, as a set of larger fusion proteins (e.g., for phage display) containing the set of NOVX sequences therein. There are a variety of methods which can be used to produce libraries of potential NOVX variants from a degenerate oligonucleotide sequence. Chemical synthesis of a degenerate gene sequence can be performed in an automatic DNA synthesizer, and the synthetic gene then ligated into an appropriate expression vector. Use of a degenerate set of genes allows for the provision, in one mixture, of all of the sequences encoding the desired set of potential NOVX sequences. Methods for synthesizing degenerate oligonucleotides are well-known within the art. See, e.g., Narang, 1983. Tetrahedron 39: 3; Itakura, et al., 1984. Annu. Rev. Biochem. 53: 323; Itakura, et al., 1984. Science 198: 1056; Ike, et al., 1983. Nucl. Acids Res. 11: 477.

[0159] Polypeptide Libraries

[0160] In addition, libraries of fragments of the NOVX protein coding sequences can be used to generate a variegated population of NOVX fragments for screening and subsequent selection of variants of a NOVX protein. In one embodiment, a library of coding sequence fragments can be generated by treating a double stranded PCR fragment of a NOVX coding sequence with a nuclease under conditions wherein nicking occurs only about once per molecule, denaturing the double stranded DNA, renaturing the DNA to form double-stranded DNA that can include sense/antisense pairs from different nicked products, removing single stranded portions from reformed duplexes by treatment with SI nuclease, and ligating the resulting fragment library into an expression vector. By this method, expression libraries can be derived which encodes N-terminal and internal fragments of various sizes of the NOVX proteins.

[0161] Various techniques are known in the art for screening gene products of combinatorial libraries made by point mutations or truncation, and for screening cDNA libraries for gene products having a selected property. Such techniques are adaptable for rapid screening of the gene libraries generated by the combinatorial mutagenesis of NOVX proteins. The most widely used techniques, which are amenable to high throughput analysis, for screening large gene libraries typically include cloning the gene library into replicable expression vectors, transforming appropriate cells with the resulting library of vectors, and expressing the combinatorial genes under conditions in which detection of a desired activity facilitates isolation of the vector encoding the gene whose product was detected. Recursive ensemble mutagenesis (REM), a new technique that enhances the frequency of functional mutants in the libraries, can be used in combination with the screening assays to identify NOVX variants. See, e.g., Arkin and Yourvan, 1992. Proc. Natl. Acad. Sci. USA 89: 7811-7815; Delgrave, et al., 1993. Protein Engineering 6:327-331.

[0162] Anti-NOVX Antibodies

[0163] Included in the invention are antibodies to NOVX proteins, or fragments of NOVX proteins. The term “antibody” as used herein refers to immunoglobulin molecules and immunologically active portions of immunoglobulin (Ig) molecules, i.e., molecules that contain an antigen binding site that specifically binds (immunoreacts with) an antigen. Such antibodies include, but are not limited to, polyclonal, monoclonal, chimeric, single chain, F_{ab}, F_{ab′} and F_{(ab′)2} fragments, and an F_{ab} expression library. In general, antibody molecules obtained from humans relates to any of the classes IgG, IgM, IgA, IgE and IgD, which differ from one another by the nature of the heavy chain present in the molecule. Certain classes have subclasses as well, such as IgG₁, IgG₂, and others. Furthermore, in humans, the light chain may be a kappa chain or a lambda chain. Reference herein to antibodies includes a reference to all such classes, subclasses and types of human antibody species.

[0164] An isolated protein of the invention intended to serve as an antigen, or a portion or fragment thereof, can be used as an immunogen to generate antibodies that immunospecifically bind the antigen, using standard techniques for polyclonal and monoclonal antibody preparation. The full-length protein can be used or, alternatively, the invention provides antigenic peptide fragments of the antigen for use as immunogens. An antigenic peptide fragment comprises at least 6 amino acid residues of the amino acid sequence of the full length protein, such as an amino acid sequence of SEQ ID NO:2n, wherein n is an integer between 1 and 141, and encompasses an epitope thereof such that an antibody raised against the peptide forms a specific immune complex with the full length protein or with any fragment that contains the epitope. Preferably, the antigenic peptide comprises at least 10 amino acid residues, or at least 15 amino acid residues, or at least 20 amino acid residues, or at least 30 amino acid residues. Preferred epitopes encompassed by the antigenic peptide are regions of the protein that are located on its surface; commonly these are hydrophilic regions.

[0165] In certain embodiments of the invention, at least one epitope encompassed by the antigenic peptide is a region of NOVX that is located on the surface of the protein, e.g., a hydrophilic region. A hydrophobicity analysis of the human NOVX protein sequence will indicate which regions of a NOVX polypeptide are particularly hydrophilic and, therefore, are likely to encode surface residues useful for targeting antibody production. As a means for targeting antibody production, hydropathy plots showing regions of hydrophilicity and hydrophobicity may be generated by any method well known in the art, including, for example, the Kyte Doolittle or the Hopp Woods methods, either with or without Fourier transformation. See, e.g., Hopp and Woods, 1981, Proc. Nat. Acad. Sci. USA 78: 3824-3828; Kyte and Doolittle 1982, J. Mol. Biol. 157: 105-142, each incorporated herein by reference in their entirety. Antibodies that are specific for one or more domains within an antigenic protein, or derivatives, fragments, analogs or homologs thereof, are also provided herein.

[0166] The term “epitope” includes any protein determinant capable of specific binding to an immunoglobulin or T-cell receptor. Epitopic determinants usually consist of chemically active surface groupings of molecules such as amino acids or sugar side chains and usually have specific three dimensional structural characteristics, as well as specific charge characteristics. A NOVX polypeptide or a fragment thereof comprises at least one antigenic epitope. An anti-NOVX antibody of the present invention is said to specifically bind to antigen NOVX when the equilibrium binding constant (K_{D}) is ≦1 μM, preferably ≦100 nM, more preferably ≦10 nM, and most preferably ≦100 pM to about 1 pM, as measured by assays such as radioligand binding assays or similar assays known to those skilled in the art.

[0167] A protein of the invention, or a derivative, fragment, analog, homolog or ortholog thereof, may be utilized as an immunogen in the generation of antibodies that immunospecifically bind these protein components.

[0168] Various procedures known within the art may be used for the production of polyclonal or monoclonal antibodies directed against a protein of the invention, or against derivatives, fragments, analogs homologs or orthologs thereof (see, for example, Antibodies: A Laboratory Manual, Harlow E, and Lane D, 1988, Cold Spring Harbor Laboratory Press, Cold Spring Harbor, N.Y., incorporated herein by reference). Some of these antibodies are discussed below.

[0169] Polyclonal Antibodies

[0170] For the production of polyclonal antibodies, various suitable host animals (e.g., rabbit, goat, mouse or other mammal) may be immunized by one or more injections with the native protein, a synthetic variant thereof, or a derivative of the foregoing. An appropriate immunogenic preparation can contain, for example, the naturally occurring immunogenic protein, a chemically synthesized polypeptide representing the immunogenic protein, or a recombinantly expressed immunogenic protein. Furthermore, the protein may be conjugated to a second protein known to be immunogenic in the mammal being immunized. Examples of such immunogenic proteins include but are not limited to keyhole limpet hemocyanin, serum albumin, bovine thyroglobulin, and soybean trypsin inhibitor. The preparation can further include an adjuvant. Various adjuvants used to increase the immunological response include, but are not limited to, Freund's (complete and incomplete), mineral gels (e.g., aluminum hydroxide), surface active substances (e.g., lysolecithin, pluronic polyols, polyanions, peptides, oil emulsions, dinitrophenol, etc.), adjuvants usable in humans such as Bacille Calmette-Guerin and Corynebacterium parvum, or similar immunostimulatory agents. Additional examples of adjuvants which can be employed include MPL-TDM adjuvant (monophosphoryl Lipid A, synthetic trehalose dicorynomycolate).

[0171] The polyclonal antibody molecules directed against the immunogenic protein can be isolated from the mammal (e.g., from the blood) and further purified by well known techniques, such as affinity chromatography using protein A or protein G, which provide primarily the IgG fraction of immune serum. Subsequently, or alternatively, the specific antigen which is the target of the immunoglobulin sought, or an epitope thereof, may be immobilized on a column to purify the immune specific antibody by immunoaffinity chromatography. Purification of immunoglobulins is discussed, for example, by D. Wilkinson (The Scientist, published by The Scientist, Inc., Philadelphia Pa., Vol. 14, No. 8 (Apr. 17, 2000), pp. 25-28).

[0172] Monoclonal Antibodies

[0173] The term “monoclonal antibody” (MAb) or “monoclonal antibody composition”, as used herein, refers to a population of antibody molecules that contain only one molecular species of antibody molecule consisting of a unique light chain gene product and a unique heavy chain gene product. In particular, the complementarity determining regions (CDRs) of the monoclonal antibody are identical in all the molecules of the population. MAbs thus contain an antigen binding site capable of immunoreacting with a particular epitope of the antigen characterized by a unique binding affinity for it.

[0174] Monoclonal antibodies can be prepared using hybridoma methods, such as those described by Kohler and Milstein, Nature, 256:495 (1975). In a hybridoma method, a mouse, hamster, or other appropriate host animal, is typically immunized with an immunizing agent to elicit lymphocytes that produce or are capable of producing antibodies that will specifically bind to the immunizing agent. Alternatively, the lymphocytes can be immunized in vitro.

[0175] The immunizing agent will typically include the protein antigen, a fragment thereof or a fusion protein thereof. Generally, either peripheral blood lymphocytes are used if cells of human origin are desired, or spleen cells or lymph node cells are used if non-human mammalian sources are desired. The lymphocytes are then fused with an immortalized cell line using a suitable fusing agent, such as polyethylene glycol, to form a hybridoma cell (Goding, Monoclonal Antibodies: Principles and Practice, Academic Press, (1986) pp. 59-103). Immortalized cell lines are usually transformed mammalian cells, particularly myeloma cells of rodent, bovine and human origin. Usually, rat or mouse myeloma cell lines are employed. The hybridoma cells can be cultured in a suitable culture medium that preferably contains one or more substances that inhibit the growth or survival of the unfused, immortalized cells. For example, if the parental cells lack the enzyme hypoxanthine guanine phosphoribosyl transferase (HGPRT or HPRT), the culture medium for the hybridomas typically will include hypoxanthine, aminopterin, and thymidine (“HAT medium”), which substances prevent the growth of HGPRT-deficient cells.

[0176] Preferred immortalized cell lines are those that fuse efficiently, support stable high level expression of antibody by the selected antibody-producing cells, and are sensitive to a medium such as HAT medium. More preferred immortalized cell lines are murine myeloma lines, which can be obtained, for instance, from the Salk Institute Cell Distribution Center, San Diego, Calif. and the American Type Culture Collection, Manassas, Va. Human myeloma and mouse-human heteromyeloma cell lines also have been described for the production of human monoclonal antibodies (Kozbor, J. Immunol., 133:3001 (1984); Brodeur et al., Monoclonal Antibody Production Techniques and Applications, Marcel Dekker, Inc., New York, (1987) pp. 51-63).

[0177] The culture medium in which the hybridoma cells are cultured can then be assayed for the presence of monoclonal antibodies directed against the antigen. Preferably, the binding specificity of monoclonal antibodies produced by the hybridoma cells is determined by immunoprecipitation or by an in vitro binding assay, such as radioimmunoassay (RIA) or enzyme-linked immunoabsorbent assay (ELISA). Such techniques and assays are known in the art. The binding affinity of the monoclonal antibody can, for example, be determined by the Scatchard analysis of Munson and Pollard, Anal. Biochem., 107:220 (1980). It is an objective, especially important in therapeutic applications of monoclonal antibodies, to identify antibodies having a high degree of specificity and a high binding affinity for the target antigen.

[0178] After the desired hybridoma cells are identified, the clones can be subcloned by limiting dilution procedures and grown by standard methods (Goding, 1986). Suitable culture media for this purpose include, for example, Dulbecco's Modified Eagle's Medium and RPMI-1640 medium. Alternatively, the hybridoma cells can be grown in vivo as ascites in a mammal.

[0179] The monoclonal antibodies secreted by the subclones can be isolated or purified from the culture medium or ascites fluid by conventional immunoglobulin purification procedures such as, for example, protein A-Sepharose, hydroxylapatite chromatography, gel electrophoresis, dialysis, or affinity chromatography.

[0180] The monoclonal antibodies can also be made by recombinant DNA methods, such as those described in U.S. Pat. No. 4,816,567. DNA encoding the monoclonal antibodies of the invention can be readily isolated and sequenced using conventional procedures (e.g., by using oligonucleotide probes that are capable of binding specifically to genes encoding the heavy and light chains of murine antibodies). The hybridoma cells of the invention serve as a preferred source of such DNA. Once isolated, the DNA can be placed into expression vectors, which are then transfected into host cells such as simian COS cells, Chinese hamster ovary (CHO) cells, or myeloma cells that do not otherwise produce immunoglobulin protein, to obtain the synthesis of monoclonal antibodies in the recombinant host cells. The DNA also can be modified, for example, by substituting the coding sequence for human heavy and light chain constant domains in place of the homologous murine sequences (U.S. Pat. No. 4,816,567; Morrison, Nature 368, 812-13 (1994)) or by covalently joining to the immunoglobulin coding sequence all or part of the coding sequence for a non-immunoglobulin polypeptide. Such a non-immunoglobulin polypeptide can be substituted for the constant domains of an antibody of the invention, or can be substituted for the variable domains of one antigen-combining site of an antibody of the invention to create a chimeric bivalent antibody.

[0181] Humanized Antibodies

[0182] The antibodies directed against the protein antigens of the invention can further comprise humanized antibodies or human antibodies. These antibodies are suitable for administration to humans without engendering an immune response by the human against the administered immunoglobulin. Humanized forms of antibodies are chimeric immunoglobulins, immunoglobulin chains or fragments thereof (such as Fv, Fab, Fab′, F(ab′)₂ or other antigen-binding subsequences of antibodies) that are principally comprised of the sequence of a human immunoglobulin, and contain minimal sequence derived from a non-human immunoglobulin. Humanization can be performed following the method of Winter and co-workers (Jones et al., Nature, 321:522-525 (1986); Riechmann et al., Nature, 332:323-327 (1988); Verhoeyen et al., Science, 239:1534-1536 (1988)), by substituting rodent CDRs or CDR sequences for the corresponding sequences of a human antibody. (See also U.S. Pat. No.5,225,539.) In some instances, Fv framework residues of the human immunoglobulin are replaced by corresponding non-human residues. Humanized antibodies can also comprise residues which are found neither in the recipient antibody nor in the imported CDR or framework sequences. In general, the humanized antibody will comprise substantially all of at least one, and typically two, variable domains, in which all or substantially all of the CDR regions correspond to those of a non-human immunoglobulin and all or substantially all of the framework regions are those of a human immunoglobulin consensus sequence. The humanized antibody optimally also will comprise at least a portion of an immunoglobulin constant region (Fe), typically that of a human immunoglobulin (Jones et al., 1986; Riechmann et al., 1988; and Presta, Curr. Op. Struct. Biol., 2:593-596 (1992)).

[0183] Human Antibodies

[0184] Fully human antibodies essentially relate to antibody molecules in which the entire sequence of both the light chain and the heavy chain, including the CDRs, arise from human genes. Such antibodies are termed “human antibodies”, or “fully human antibodies” herein. Human monoclonal antibodies can be prepared by the trioma technique; the human B-cell hybridoma technique (see Kozbor, et al., 1983 Immunol Today 4: 72) and the EBV hybridoma technique to produce human monoclonal antibodies (see Cole, et al., 1985 In: MONOCLONAL ANTIBODIES AND CANCER THERAPY, Alan R. Liss, Inc., pp. 77-96). Human monoclonal antibodies may be utilized in the practice of the present invention and may be produced by using human hybridomas (see Cote, et al., 1983. Proc Natl Acad Sci USA 80: 2026-2030) or by transforming human B-cells with Epstein Barr Virus in vitro (see Cole, et al., 1985 In: MONOCLONAL ANTIBODIES AND CANCER THERAPY, Alan R. Liss, Inc., pp. 77-96).

[0185] In addition, human antibodies can also be produced using additional techniques, including phage display libraries (Hoogenboom and Winter, J. Mol. Biol., 227:381 (1991); Marks et al., J. Mol. Biol., 222:581 (1991)). Similarly, human antibodies can be made by introducing human immunoglobulin loci into transgenic animals, e.g., mice in which the endogenous immunoglobulin genes have been partially or completely inactivated. Upon challenge, human antibody production is observed, which closely resembles that seen in humans in all respects, including gene rearrangement, assembly, and antibody repertoire. This approach is described, for example, in U.S. Pat. Nos. 5,545,807; 5,545,806; 5,569,825; 5,625,126; 5,633,425; 5,661,016, and in Marks et al. (Bio/Technology 10, 779-783 (1992)); Lonberg et al. (Nature 368 856-859 (1994)); Morrison (Nature 368, 812-13 (1994)); Fishwild et al,(Nature Biotechnology 14, 845-51 (1996)); Neuberger (Nature Biotechnology 14, 826 (1996)); and Lonberg and Huszar (Intern. Rev. Immunol. 13 65-93 (1995)).

[0186] Human antibodies may additionally be produced using transgenic nonhuman animals which are modified so as to produce fully human antibodies rather than the animal's endogenous antibodies in response to challenge by an antigen. (See PCT publication WO94/02602). The endogenous genes encoding the heavy and light immunoglobulin chains in the nonhuman host have been incapacitated, and active loci encoding human heavy and light chain immunoglobulins are inserted into the host's genome. The human genes are incorporated, for example, using yeast artificial chromosomes containing the requisite human DNA segments. An animal which provides all the desired modifications is then obtained as progeny by crossbreeding intermediate transgenic animals containing fewer than the full complement of the modifications. The preferred embodiment of such a nonhuman animal is a mouse, and is termed the Xenomouse™ as disclosed in PCT publications WO96/33735 and WO96/34096. This animal produces B cells which secrete fully human immunoglobulins. The antibodies can be obtained directly from the animal after immunization with an immunogen of interest, as, for example, a preparation of a polyclonal antibody, or alternatively from immortalized B cells derived from the animal, such as hybridomas producing monoclonal antibodies. Additionally, the genes encoding the immunoglobulins with human variable regions can be recovered and expressed to obtain the antibodies directly, or can be further modified to obtain analogs of antibodies such as, for example, single chain Fv molecules.

[0187] An example of a method of producing a nonhuman host, exemplified as a mouse, lacking expression of an endogenous immunoglobulin heavy chain is disclosed in U.S. Pat. No. 5,939,598. It can be obtained by a method including deleting the J segment genes from at least one endogenous heavy chain locus in an embryonic stem cell to prevent rearrangement of the locus and to prevent formation of a transcript of a rearranged immunoglobulin heavy chain locus, the deletion being effected by a targeting vector containing a gene encoding a selectable marker; and producing from the embryonic stem cell a transgenic mouse whose somatic and germ cells contain the gene encoding the selectable marker.

[0188] A method for producing an antibody of interest, such as a human antibody, is disclosed in U.S. Pat. No. 5,916,771. It includes introducing an expression vector that contains a nucleotide sequence encoding a heavy chain into one mammalian host cell in culture, introducing an expression vector containing a nucleotide sequence encoding a light chain into another mammalian host cell, and fusing the two cells to form a hybrid cell. The hybrid cell expresses an antibody containing the heavy chain and the light chain.

[0189] In a further improvement on this procedure, a method for identifying a clinically relevant epitope on an immunogen, and a correlative method for selecting an antibody that binds immunospecifically to the relevant epitope with high affinity, are disclosed in PCT publication WO 99/53049.

[0190] F_{ab} Fragments and Single Chain Antibodies

[0191] According to the invention, techniques can be adapted for the production of single-chain antibodies specific to an antigenic protein of the invention (see e.g., U.S. Pat. No. 4,946,778). In addition, methods can be adapted for the construction of F_{ab} expression libraries (see e.g., Huse, et al., 1989 Science 246: 1275-1281) to allow rapid and effective identification of monoclonal F_{ab} fragments with the desired specificity for a protein or derivatives, fragments, analogs or homologs thereof. Antibody fragments that contain the idiotypes to a protein antigen may be produced by techniques known in the art including, but not limited to: (i) an F_{(ab′)2} fragment produced by pepsin digestion of an antibody molecule; (ii) an F_{ab} fragment generated by reducing the disulfide bridges of an F_{(ab′)2} fragment; (iii) an F_{ab} fragment generated by the treatment of the antibody molecule with papain and a reducing agent and (iv) Fᵥ fragments.

[0192] Bispeciric Antibodies

[0193] Bispecific antibodies are monoclonal, preferably human or humanized, antibodies that have binding specificities for at least two different antigens. In the present case, one of the binding specificities is for an antigenic protein of the invention. The second binding target is any other antigen, and advantageously is a cell-surface protein or receptor or receptor subunit.

[0194] Methods for making bispecific antibodies are known in the art. Traditionally, the recombinant production of bispecific antibodies is based on the co-expression of two immunoglobulin heavy-chain/light-chain pairs, where the two heavy chains have different specificities (Milstein and Cuello, Nature, 305:537-539 (1983)). Because of the random assortment of immunoglobulin heavy and light chains, these hybridomas (quadromas) produce a potential mixture of ten different antibody molecules, of which only one has the correct bispecific structure. The purification of the correct molecule is usually accomplished by affinity chromatography steps. Similar procedures are disclosed in WO 93/08829, published May 13, 1993, and in Traunecker et al., EMBO J., 10:3655-3659 (1991).

[0195] Antibody variable domains with the desired binding specificities (antibody-antigen combining sites) can be fused to immunoglobulin constant domain sequences. The fusion preferably is with an immunoglobulin heavy-chain constant domain, comprising at least part of the hinge, CH2, and CH3 regions. It is preferred to have the first heavy-chain constant region (CH1) containing the site necessary for light-chain binding present in at least one of the fusions. DNAs encoding the immunoglobulin heavy-chain fusions and, if desired, the immunoglobulin light chain, are inserted into separate expression vectors, and are co-transfected into a suitable host organism. For further details of generating bispecific antibodies see, for example, Suresh et al., Methods in Enzymology, 121:210 (1986).

[0196] According to another approach described in WO 96/27011, the interface between a pair of antibody molecules can be engineered to maximize the percentage of heterodimers which are recovered from recombinant cell culture. The preferred interface comprises at least a part of the CH3 region of an antibody constant domain. In this method, one or more small amino acid side chains from the interface of the first antibody molecule are replaced with larger side chains (e.g. tyrosine or tryptophan). Compensatory “cavities” of identical or similar size to the large side chain(s) are created on the interface of the second antibody molecule by replacing large amino acid side chains with smaller ones (e.g. alanine or threonine). This provides a mechanism for increasing the yield of the heterodimer over other unwanted end-products such as homodimers.

[0197] Bispecific antibodies can be prepared as full length antibodies or antibody fragments (e.g. F(ab′)₂ bispecific antibodies). Techniques for generating bispecific antibodies from antibody fragments have been described in the literature. For example, bispecific antibodies can be prepared using chemical linkage. Brennan et al., Science 229:81 (1985) describe a procedure wherein intact antibodies are proteolytically cleaved to generate F(ab′)₂ fragments. These fragments are reduced in the presence of the dithiol complexing agent sodium arsenite to stabilize vicinal dithiols and prevent intermolecular disulfide formation. The Fab′ fragments generated are then converted to thionitrobenzoate (TNB) derivatives. One of the Fab′-TNB derivatives is then reconverted to the Fab′-thiol by reduction with mercaptoethylamine and is mixed with an equimolar amount of the other Fab′-TNB derivative to form the bispecific antibody. The bispecific antibodies produced can be used as agents for the selective immobilization of enzymes.

[0198] Additionally, Fab′ fragments can be directly recovered from E. coli and chemically coupled to form bispecific antibodies. Shalaby et al., J. Exp. Med. 175:217-225 (1992) describe the production of a fully humanized bispecific antibody F(ab′)₂ molecule. Each Fab′ fragment was separately secreted from E. coli and subjected to directed chemical coupling in vitro to form the bispecific antibody. The bispecific antibody thus formed was able to bind to cells overexpressing the ErbB2 receptor and normal human T cells, as well as trigger the lytic activity of human cytotoxic lymphocytes against human breast tumor targets.

[0199] Various techniques for making and isolating bispecific antibody fragments directly from recombinant cell culture have also been described. For example, bispecific antibodies have been produced using leucine zippers. Kostelny et al., J. Immunol. 148(5):1547-1553 (1992). The leucine zipper peptides from the Fos and Jun proteins were linked to the Fab′ portions of two different antibodies by gene fusion. The antibody homodimers were reduced at the hinge region to form monomers and then re-oxidized to form the antibody heterodimers. This method can also be utilized for the production of antibody homodimers. The “diabody” technology described by Hollinger et al., Proc. Natl. Acad. Sci. USA 90:6444-6448 (1993) has provided an alternative mechanism for making bispecific antibody fragments. The fragments comprise a heavy-chain variable domain (V_{H}) connected to a light-chain variable domain (V_{L}) by a linker which is too short to allow pairing between the two domains on the same chain. Accordingly, the V_{H} and V_{L} domains of one fragment are forced to pair with the complementary V_{L} and V_{H} domains of another fragment, thereby forming two antigen-binding sites. Another strategy for making bispecific antibody fragments by the use of single-chain Fv (sFv) dimers has also been reported. See, Gruber et al., J. Immunol. 152:5368 (1994).

[0200] Antibodies with more than two valencies are contemplated. For example, trispecific antibodies can be prepared. Tutt et al., J. Immunol. 147:60 (1991).

[0201] Exemplary bispecific antibodies can bind to two different epitopes, at least one of which originates in the protein antigen of the invention. Alternatively, an anti-antigenic arm of an immunoglobulin molecule can be combined with an arm which binds to a triggering molecule on a leukocyte such as a T-cell receptor molecule (e.g. CD2, CD3, CD28, or B7), or Fc receptors for IgG (FcγR), such as FcγRI (CD64), FcγRII (CD32) and FcγRIII (CD16) so as to focus cellular defense mechanisms to the cell expressing the particular antigen. Bispecific antibodies can also be used to direct cytotoxic agents to cells which express a particular antigen. These antibodies possess an antigen-binding arm and an arm which binds a cytotoxic agent or a radionuclide chelator, such as EOTUBE, DPTA, DOTA, or TETA. Another bispecific antibody of interest binds the protein antigen described herein and further binds tissue factor (TF).

[0202] Heteroconjugate Antibodies

[0203] Heteroconjugate antibodies are also within the scope of the present invention. Heteroconjugate antibodies are composed of two covalently joined antibodies. Such antibodies have, for example, been proposed to target immune system cells to unwanted cells (U.S. Pat. No. 4,676,980), and for treatment of HIV infection (WO 91/00360; WO 92/200373; EP 03089). It is contemplated that the antibodies can be prepared in vitro using known methods in synthetic protein chemistry, including those involving crosslinking agents. For example, immunotoxins can be constructed using a disulfide exchange reaction or by forming a thioether bond. Examples of suitable reagents for this purpose include iminothiolate and methyl-4-mercaptobutyrimidate and those disclosed, for example, in U.S. Pat. No. 4,676,980.

[0204] Effector Function Engineering

[0205] It can be desirable to modify the antibody of the invention with respect to effector function, so as to enhance, e.g., the effectiveness of the antibody in treating cancer. For example, cysteine residue(s) can be introduced into the Fc region, thereby allowing interchain disulfide bond formation in this region. The homodimeric antibody thus generated can have improved internalization capability and/or increased complement-mediated cell killing and antibody-dependent cellular cytotoxicity (ADCC). See Caron et al., J. Exp Med., 176: 1191-1195 (1992) and Shopes, J. Immunol., 148: 2918-2922 (1992). Homodimeric antibodies with enhanced anti-tumor activity can also be prepared using heterobifunctional cross-linkers as described in Wolff et al. Cancer Research, 53: 2560-2565 (1993). Alternatively, an antibody can be engineered that has dual Fc regions and can thereby have enhanced complement lysis and ADCC capabilities. See Stevenson et al., Anti-Cancer Drug Design, 3: 219-230 (1989).

[0206] Immunoconjugates

[0207] The invention also pertains to immunoconjugates comprising an antibody conjugated to a cytotoxic agent such as a chemotherapeutic agent, toxin (e.g., an enzymatically active toxin of bacterial, fungal, plant, or animal origin, or fragments thereof), or a radioactive isotope (i.e., a radioconjugate).

[0208] Chemotherapeutic agents useful in the generation of such immunoconjugates have been described above. Enzymatically active toxins and fragments thereof that can be used include diphtheria A chain, nonbinding active fragments of diphtheria toxin, exotoxin A chain (from Pseudomonas aeruginosa), ricin A chain, abrin A chain, modeccin A chain, alpha-sarcin, Aleurites fordii proteins, dianthin proteins, Phytolaca americana proteins (PAPI, PAPII, and PAP-S), momordica charantia inhibitor, curcin, crotin, sapaonaria officinalis inhibitor, gelonin, mitogellin, restrictocin, phenomycin, enomycin, and the tricothecenes. A variety of radionuclides are available for the production of radioconjugated antibodies. Examples include ²¹²Bi, ¹³¹I, ¹³¹In, ⁹⁰Y, and ¹⁸⁶Re.

[0209] Conjugates of the antibody and cytotoxic agent are made using a variety of bifunctional protein-coupling agents such as N-succinimidyl-3-(2-pyridyldithiol) propionate (SPDP), iminothiolane (IT), bifunctional derivatives of imidoesters (such as dimethyl adipimidate HCL), active esters (such as disuccinimidyl suberate), aldehydes (such as glutareldehyde), bis-azido compounds (such as bis (p-azidobenzoyl) hexanediamine), bis-diazonium derivatives (such as bis-(p-diazoniumbenzoyl)-ethylenediamine), diisocyanates (such as tolyene 2,6-diisocyanate), and bis-active fluorine compounds (such as 1,5-difluoro-2,4-dinitrobenzene). For example, a ricin immunotoxin can be prepared as described in Vitetta et al., Science, 238: 1098 (1987). Carbon-14-labeled 1-isothiocyanatobenzyl-3-methyldiethylene triaminepentaacetic acid (MX-DTPA) is an exemplary chelating agent for conjugation of radionucleotide to the antibody. See WO94/11026.

[0210] In another embodiment, the antibody can be conjugated to a “receptor” (such streptavidin) for utilization in tumor pretargeting wherein the antibody-receptor conjugate is administered to the patient, followed by removal of unbound conjugate from the circulation using a clearing agent and then administration of a “ligand” (e.g., avidin) that is in turn conjugated to a cytotoxic agent.

[0211] Immunoliposomes

[0212] The antibodies disclosed herein can also be formulated as immunoliposomes. Liposomes containing the antibody are prepared by methods known in the art, such as described in Epstein et al., Proc. Natl. Acad. Sci. USA, 82: 3688 (1985); Hwang et al., Proc. Natl Acad. Sci. USA, 77: 4030 (1980); and U.S. Pat. Nos. 4,485,045 and 4,544,545. Liposomes with enhanced circulation time are disclosed in U.S. Pat. No. 5,013,556.

[0213] Particularly useful liposomes can be generated by the reverse-phase evaporation method with a lipid composition comprising phosphatidylcholine, cholesterol, and PEG-derivatized phosphatidylethanolamine (PEG-PE). Liposomes are extruded through filters of defined pore size to yield liposomes with the desired diameter. Fab′ fragments of the antibody of the present invention can be conjugated to the liposomes as described in Martin et al., J. Biol. Chem., 257: 286-288 (1982) via a disulfide-interchange reaction. A chemotherapeutic agent (such as Doxorubicin) is optionally contained within the liposome. See Gabizon et al., J. National Cancer Inst., 81(19): 1484 (1989).

[0214] Diagnostic Applications of Antibodies Directed Against the Proteins of the Invention

[0215] In one embodiment, methods for the screening of antibodies that possess the desired specificity include, but are not limited to, enzyme linked immunosorbent assay (ELISA) and other immunologically mediated techniques known within the art. In a specific embodiment, selection of antibodies that are specific to a particular domain of an NOVX protein is facilitated by generation of hybridomas that bind to the fragment of an NOVX protein possessing such a domain. Thus, antibodies that are specific for a desired domain within an NOVX protein, or derivatives, fragments, analogs or homologs thereof, are also provided herein.

[0216] Antibodies directed against a NOVX protein of the invention may be used in methods known within the art relating to the localization and/or quantitation of a NOVX protein (e.g., for use in measuring levels of the NOVX protein within appropriate physiological samples, for use in diagnostic methods, for use in imaging the protein, and the like). In a given embodiment, antibodies specific to a NOVX protein, or derivative, fragment, analog or homolog thereof, that contain the antibody derived antigen binding domain, are utilized as pharmacologically active compounds (referred to hereinafter as “Therapeutics”).

[0217] An antibody specific for a NOVX protein of the invention (e.g., a monoclonal antibody or a polyclonal antibody) can be used to isolate a NOVX polypeptide by standard techniques, such as immunoaffinity, chromatography or immunoprecipitation. An antibody to a NOVX polypeptide can facilitate the purification of a natural NOVX antigen from cells, or of a recombinantly produced NOVX antigen expressed in host cells. Moreover, such an anti-NOVX antibody can be used to detect the antigenic NOVX protein (e.g., in a cellular lysate or cell supernatant) in order to evaluate the abundance and pattern of expression of the antigenic NOVX protein. Antibodies directed against a NOVX protein can be used diagnostically to monitor protein levels in tissue as part of a clinical testing procedure, e.g., to, for example, determine the efficacy of a given treatment regimen. Detection can be facilitated by coupling (i.e., physically linking) the antibody to a detectable substance. Examples of detectable substances include various enzymes, prosthetic groups, fluorescent materials, luminescent materials, bioluminescent materials, and radioactive materials. Examples of suitable enzymes include horseradish peroxidase, alkaline phosphatase, β-galactosidase, or acetylcholinesterase; examples of suitable prosthetic group complexes include streptavidin/biotin and avidin/biotin; examples of suitable fluorescent materials include umbelliferone, fluorescein, fluorescein isothiocyanate, rhodamine, dichlorotriazinylamine fluorescein, dansyl chloride or phycoerythrin; an example of a luminescent material includes luminol; examples of bioluminescent materials include luciferase, luciferin, and acquorin, and examples of suitable radioactive material include ¹²⁵I, ¹³¹I, ³⁵S or ³H.

[0218] Antibody Therapeutics

[0219] Antibodies of the invention, including polyclonal, monoclonal, humanized and fully human antibodies, may used as therapeutic agents. Such agents will generally be employed to treat or prevent a disease or pathology in a subject. An antibody preparation, preferably one having high specificity and high affinity for its target antigen, is administered to the subject and will generally have an effect due to its binding with the target. Such an effect may be one of two kinds, depending on the specific nature of the interaction between the given antibody molecule and the target antigen in question. In the first instance, administration of the antibody may abrogate or inhibit the binding of the target with an endogenous ligand to which it naturally binds. In this case, the antibody binds to the target and masks a binding site of the naturally occurring ligand, wherein the ligand serves as an effector molecule. Thus the receptor mediates a signal transduction pathway for which ligand is responsible.

[0220] Alternatively, the effect may be one in which the antibody elicits a physiological result by virtue of binding to an effector binding site on the target molecule. In this case the target, a receptor having an endogenous ligand which may be absent or defective in the disease or pathology, binds the antibody as a surrogate effector ligand, initiating a receptor-based signal transduction event by the receptor.

[0221] A therapeutically effective amount of an antibody of the invention relates generally to the amount needed to achieve a therapeutic objective. As noted above, this may be a binding interaction between the antibody and its target antigen that, in certain cases, interferes with the functioning of the target, and in other cases, promotes a physiological response. The amount required to be administered will furthermore depend on the binding affinity of the antibody for its specific antigen, and will also depend on the rate at which an administered antibody is depleted from the free volume other subject to which it is administered. Common ranges for therapeutically effective dosing of an antibody or antibody fragment of the invention may be, by way of nonlimiting example, from about 0.1 mg/kg body weight to about 50 mg/kg body weight. Common dosing frequencies may range, for example, from twice daily to once a week.

[0222] Pharmaceutical Compositions of Antibodies

[0223] Antibodies specifically binding a protein of the invention, as well as other molecules identified by the screening assays disclosed herein, can be administered for the treatment of various disorders in the form of pharmaceutical compositions. Principles and considerations involved in preparing such compositions, as well as guidance in the choice of components are provided, for example, in Remington: The Science And Practice Of Pharmacy 19th ed. (Alfonso R. Gennaro, et al., editors) Mack Pub. Co., Easton, Pa.: 1995; Drug Absorption Enhancement: Concepts, Possibilities, Limitations, And Trends, Harwood Academic Publishers, Langhorne, Pa., 1994; and Peptide And Protein Drug Delivery (Advances In Parenteral Sciences, Vol. 4), 1991, M. Dekker, New York.

[0224] If the antigenic protein is intracellular and whole antibodies are used as inhibitors, internalizing antibodies are preferred. However, liposomes can also be used to deliver the antibody, or an antibody fragment, into cells. Where antibody fragments are used, the smallest inhibitory fragment that specifically binds to the binding domain of the target protein is preferred. For example, based upon the variable-region sequences of an antibody, peptide molecules can be designed that retain the ability to bind the target protein sequence. Such peptides can be synthesized chemically and/or produced by recombinant DNA technology. See, e.g., Marasco et al., Proc. Natl. Acad. Sci. USA, 90: 7889-7893 (1993). The formulation herein can also contain more than one active compound as necessary for the particular indication being treated, preferably those with complementary activities that do not adversely affect each other. Alternatively, or in addition, the composition can comprise an agent that enhances its function, such as, for example, a cytotoxic agent, cytokine, chemotherapeutic agent, or growth-inhibitory agent. Such molecules are suitably present in combination in amounts that are effective for the purpose intended.

[0225] The active ingredients can also be entrapped in microcapsules prepared, for example, by coacervation techniques or by interfacial polymerization, for example, hydroxymethylcellulose or gelatin-microcapsules and poly-(methylmethacrylate) microcapsules, respectively, in colloidal drug delivery systems (for example, liposomes, albumin microspheres, microemulsions, nano-particles, and nanocapsules) or in macroemulsions.

[0226] The formulations to be used for in vivo administration must be sterile. This is readily accomplished by filtration through sterile filtration membranes.

[0227] Sustained-release preparations can be prepared. Suitable examples of sustained-release preparations include semipermeable matrices of solid hydrophobic polymers containing the antibody, which matrices are in the form of shaped articles, e.g., films, or microcapsules. Examples of sustained-release matrices include polyesters, hydrogels (for example, poly(2-hydroxyethyl-methacrylate), or poly(vinylalcohol)), polylactides (U.S. Pat. No. 3,773,919), copolymers of L-glutamic acid and γ ethyl-L-glutamate, non-degradable ethylene-vinyl acetate, degradable lactic acid-glycolic acid copolymers such as the LUPRON DEPOT™ (injectable microspheres composed of lactic acid-glycolic acid copolymer and leuprolide acetate), and poly-D-(−)-3-hydroxybutyric acid. While polymers such as ethylene-vinyl acetate and lactic acid-glycolic acid enable release of molecules for over 100 days, certain hydrogels release proteins for shorter time periods.

[0228] ELISA Assay

[0229] An agent for detecting an analyte protein is an antibody capable of binding to an analyte protein, preferably an antibody with a detectable label. Antibodies can be polyclonal, or more preferably, monoclonal. An intact antibody, or a fragment thereof (e.g., F_{ab} or F_{(ab)2}) can be used. The term “labeled”, with regard to the probe or antibody, is intended to encompass direct labeling of the probe or antibody by coupling (i.e., physically linking) a detectable substance to the probe or antibody, as well as indirect labeling of the probe or antibody by reactivity with another reagent that is directly labeled. Examples of indirect labeling include detection of a primary antibody using a fluorescently-labeled secondary antibody and end-labeling of a DNA probe with biotin such that it can be detected with fluorescently-labeled streptavidin. The term “biological sample” is intended to include tissues, cells and biological fluids isolated from a subject, as well as tissues, cells and fluids present within a subject. Included within the usage of the term “biological sample”, therefore, is blood and a fraction or component of blood including blood serum, blood plasma, or lymph. That is, the detection method of the invention can be used to detect an analyte mRNA, protein, or genomic DNA in a biological sample in vitro as well as in vivo. For example, in vitro techniques for detection of an analyte mRNA include Northern hybridizations and in situ hybridizations. In vitro techniques for detection of an analyte protein include enzyme linked immunosorbent assays (ELISAs), Western blots, immunoprecipitations, and immunofluorescence. In vitro techniques for detection of an analyte genomic DNA include Southern hybridizations. Procedures for conducting immunoassays are described, for example in “ELISA: Theory and Practice: Methods in Molecular Biology”, Vol. 42, J. R. Crowther (Ed.) Human Press, Totowa, N.J., 1995; “Immunoassay”, E. Diamandis and T. Christopoulus, Academic Press, Inc., San Diego, Calif., 1996; and “Practice and Thory of Enzyme Immunoassays”, P. Tijssen, Elsevier Science Publishers, Amsterdam, 1985. Furthermore, in vivo techniques for detection of an analyte protein include introducing into a subject a labeled anti-an analyte protein antibody. For example, the antibody can be labeled with a radioactive marker whose presence and location in a subject can be detected by standard imaging techniques.

[0230] NOVX Recombinant Expression Vectors and Host Cells

[0231] Another aspect of the invention pertains to vectors, preferably expression vectors, containing a nucleic acid encoding a NOVX protein, or derivatives, fragments, analogs or homologs thereof. As used herein, the term “vector” refers to a nucleic acid molecule capable of transporting another nucleic acid to which it has been linked. One type of vector is a “plasmid”, which refers to a circular double stranded DNA loop into which additional DNA segments can be ligated. Another type of vector is a viral vector, wherein additional DNA segments can be ligated into the viral genome. Certain vectors are capable of autonomous replication in a host cell into which they are introduced (e.g., bacterial vectors having a bacterial origin of replication and episomal mammalian vectors). Other vectors (e.g., non-episomal mammalian vectors) are integrated into the genome of a host cell upon introduction into the host cell, and thereby are replicated along with the host genome. Moreover, certain vectors are capable of directing the expression of genes to which they are operatively-linked. Such vectors are referred to herein as “expression vectors”. In general, expression vectors of utility in recombinant DNA techniques are often in the form of plasmids. In the present specification, “plasmid” and “vector” can be used interchangeably as the plasmid is the most commonly used form of vector. However, the invention is intended to include such other forms of expression vectors, such as viral vectors (e.g., replication defective retroviruses, adenoviruses and adeno-associated viruses), which serve equivalent functions.

[0232] The recombinant expression vectors of the invention comprise a nucleic acid of the invention in a form suitable for expression of the nucleic acid in a host cell, which means that the recombinant expression vectors include one or more regulatory sequences, selected on the basis of the host cells to be used for expression, that is operatively-linked to the nucleic acid sequence to be expressed. Within a recombinant expression vector, “operably-linked” is intended to mean that the nucleotide sequence of interest is linked to the regulatory sequence(s) in a manner that allows for expression of the nucleotide sequence (e.g., in an in vitro transcription/translation system or in a host cell when the vector is introduced into the host cell).

[0233] The term “regulatory sequence” is intended to includes promoters, enhancers and other expression control elements (e.g., polyadenylation signals). Such regulatory sequences are described, for example, in Goeddel, GENE EXPRESSION TECHNOLOGY: METHODS IN ENZYMOLOGY 185, Academic Press, San Diego, Calif. (1990). Regulatory sequences include those that direct constitutive expression of a nucleotide sequence in many types of host cell and those that direct expression of the nucleotide sequence only in certain host cells (e.g., tissue-specific regulatory sequences). It will be appreciated by those skilled in the art that the design of the expression vector can depend on such factors as the choice of the host cell to be transformed, the level of expression of protein desired, etc. The expression vectors of the invention can be introduced into host cells to thereby produce proteins or peptides, including fusion proteins or peptides, encoded by nucleic acids as described herein (e.g., NOVX proteins, mutant forms of NOVX proteins, fusion proteins, etc.).

[0234] The recombinant expression vectors of the invention can be designed for expression of NOVX proteins in prokaryotic or eukaryotic cells. For example, NOVX proteins can be expressed in bacterial cells such as Escherichia coli, insect cells (using baculovirus expression vectors) yeast cells or mammalian cells. Suitable host cells are discussed further in Goeddel, GENE EXPRESSION TECHNOLOGY: METHODS IN ENZYMOLOGY 185, Academic Press, San Diego, Calif. (1990). Alternatively, the recombinant expression vector can be transcribed and translated in vitro, for example using T7 promoter regulatory sequences and T7 polymerase.

[0235] Expression of proteins in prokaryotes is most often carried out in Escherichia coli with vectors containing constitutive or inducible promoters directing the expression of either fusion or non-fusion proteins. Fusion vectors add a number of amino acids to a protein encoded therein, usually to the amino terminus of the recombinant protein. Such fusion vectors typically serve three purposes: (i) to increase expression of recombinant protein; (ii) to increase the solubility of the recombinant protein; and (iii) to aid in the purification of the recombinant protein by acting as a ligand in affinity purification. Often, in fusion expression vectors, a proteolytic cleavage site is introduced at the junction of the fusion moiety and the recombinant protein to enable separation of the recombinant protein from the fusion moiety subsequent to purification of the fusion protein. Such enzymes, and their cognate recognition sequences, include Factor Xa, thrombin and enterokinase. Typical fusion expression vectors include pGEX (Pharmacia Biotech Inc; Smith and Johnson, 1988. Gene 67: 31-40), pMAL (New England Biolabs, Beverly, Mass.) and pRIT5 (Pharmacia, Piscataway, N.J.) that fuse glutathione S-transferase (GST), maltose E binding protein, or protein A, respectively, to the target recombinant protein.

[0236] Examples of suitable inducible non-fusion E. coli expression vectors include pTrc (Amrann et al., (1988) Gene 69:301-315) and pET 11d (Studier et al., GENE EXPRESSION TECHNOLOGY: METHODS IN ENZYMOLOGY 185, Academic Press, San Diego, Calif. (1990) 60-89).

[0237] One strategy to maximize recombinant protein expression in E. coli is to express the protein in a host bacteria with an impaired capacity to proteolytically cleave the recombinant protein. See, e.g., Gottesman, GENE EXPRESSION TECHNOLOGY: METHODS IN ENZYMOLOGY 185, Academic Press, San Diego, Calif. (1990) 119-128. Another strategy is to alter the nucleic acid sequence of the nucleic acid to be inserted into an expression vector so that the individual codons for each amino acid are those preferentially utilized in E. coli (see, e.g., Wada, et al., 1992. Nucl. Acids Res. 20: 2111-2118). Such alteration of nucleic acid sequences of the invention can be carried out by standard DNA synthesis techniques.

[0238] In another embodiment, the NOVX expression vector is a yeast expression vector. Examples of vectors for expression in yeast Saccharomyces cerivisae include pYepSec 1 (Baldari, et al., 1987. EMBO J. 6: 229-234), pMFa (Kuijan and Herskowitz, 1982. Cell 30: 933-943), pJRY88 (Schultz et al., 1987. Gene 54: 113-123), pYES2 (Invitrogen Corporation, San Diego, Calif.), and picZ (InVitrogen Corp, San Diego, Calif.).

[0239] Alternatively, NOVX can be expressed in insect cells using baculovirus expression vectors. Baculovirus vectors available for expression of proteins in cultured insect cells (e.g., SF9 cells) include the pAc series (Smith, et al., 1983. Mol. Cell. Biol. 3: 2156-2165) and the pVL series (Lucklow and Summers, 1989. Virology 170: 31-39).

[0240] In yet another embodiment, a nucleic acid of the invention is expressed in mammalian cells using a mammalian expression vector. Examples of mammalian expression vectors include pCDM8 (Seed, 1987. Nature 329: 840) and pMT2PC (Kaufman, et al., 1987. EMBO J. 6: 187-195). When used in mammalian cells, the expression vector's control functions are often provided by viral regulatory elements. For example, commonly used promoters are derived from polyoma, adenovirus 2, cytomegalovirus, and simian virus 40. For other suitable expression systems for both prokaryotic and eukaryotic cells see, e.g., Chapters 16 and 17 of Sambrook, et al., MOLECULAR CLONING: A LABORATORY MANUAL. 2nd ed., Cold Spring Harbor Laboratory, Cold Spring Harbor Laboratory Press, Cold Spring Harbor, N.Y., 1989.

[0241] In another embodiment, the recombinant mammalian expression vector is capable of directing expression of the nucleic acid preferentially in a particular cell type (e.g., tissue-specific regulatory elements are used to express the nucleic acid). Tissue-specific regulatory elements are known in the art. Non-limiting examples of suitable tissue-specific promoters include the albumin promoter (liver-specific; Pinkert, et al., 1987. Genes Dev. 1: 268-277), lymphoid-specific promoters (Calame and Eaton, 1988. Adv. Immunol. 43: 235-275), in particular promoters of T cell receptors (Winoto and Baltimore, 1989. EMBO J 8: 729-733) and immunoglobulins (Banedji, et al., 1983. Cell 33: 729-740; Queen and Baltimore, 1983. Cell 33: 741-748), neuron-specific promoters (e.g., the neurofilament promoter; Byrne and Ruddle, 1989. Proc. Natl. Acad. Sci. USA 86: 5473-5477), pancreas-specific promoters (Edlund, et al., 1985. Science 230: 912-916), and mammary gland-specific promoters (e.g., milk whey promoter; U.S. Pat. No. 4,873,316 and European Application Publication No. 264,166). Developmentally-regulated promoters are also encompassed, e.g., the murine hox promoters (Kessel and Gruss, 1990. Science 249: 374-379) and the α-fetoprotein promoter (Campes and Tilghman, 1989. Genes Dev. 3: 537-546).

[0242] The invention further provides a recombinant expression vector comprising a DNA molecule of the invention cloned into the expression vector in an antisense orientation. That is, the DNA molecule is operatively-linked to a regulatory sequence in a manner that allows for expression (by transcription of the DNA molecule) of an RNA molecule that is antisense to NOVX mRNA. Regulatory sequences operatively linked to a nucleic acid cloned in the antisense orientation can be chosen that direct the continuous expression of the antisense RNA molecule in a variety of cell types, for instance viral promoters and/or enhancers, or regulatory sequences can be chosen that direct constitutive, tissue specific or cell type specific expression of antisense RNA. The antisense expression vector can be in the form of a recombinant plasmid, phagemid or attenuated virus in which antisense nucleic acids are produced under the control of a high efficiency regulatory region, the activity of which can be determined by the cell type into which the vector is introduced. For a discussion of the regulation of gene expression using antisense genes see, e.g., Weintraub, et al., “Antisense RNA as a molecular tool for genetic analysis,” Reviews—Trends in Genetics, Vol. 1(1) 1986.

[0243] Another aspect of the invention pertains to host cells into which a recombinant expression vector of the invention has been introduced. The terms “host cell” and “recombinant host cell” are used interchangeably herein. It is understood that such terms refer not only to the particular subject cell but also to the progeny or potential progeny of such a cell. Because certain modifications may occur in succeeding generations due to either mutation or environmental influences, such progeny may not, in fact, be identical to the parent cell, but are still included within the scope of the term as used herein.

[0244] A host cell can be any prokaryotic or eukaryotic cell. For example, NOVX protein can be expressed in bacterial cells such as E. coli, insect cells, yeast or mammalian cells (such as Chinese hamster ovary cells (CHO) or COS cells). Other suitable host cells are known to those skilled in the art.

[0245] Vector DNA can be introduced into prokaryotic or eukaryotic cells via conventional transformation or transfection techniques. As used herein, the terms “transformation” and “transfection” are intended to refer to a variety of art-recognized techniques for introducing foreign nucleic acid (e.g., DNA) into a host cell, including calcium phosphate or calcium chloride co-precipitation, DEAE-dextran-mediated transfection, lipofection, or electroporation. Suitable methods for transforming or transfecting host cells can be found in Sambrook, et al. (MOLECULAR CLONING: A LABORATORY MANUAL. 2nd ed., Cold Spring Harbor Laboratory, Cold Spring Harbor Laboratory Press, Cold Spring Harbor, N.Y., 1989), and other laboratory manuals.

[0246] For stable transfection of mammalian cells, it is known that, depending upon the expression vector and transfection technique used, only a small fraction of cells may integrate the foreign DNA into their genome. In order to identify and select these integrants, a gene that encodes a selectable marker (e.g., resistance to antibiotics) is generally introduced into the host cells along with the gene of interest. Various selectable markers include those that confer resistance to drugs, such as G418, hygromycin and methotrexate. Nucleic acid encoding a selectable marker can be introduced into a host cell on the same vector as that encoding NOVX or can be introduced on a separate vector. Cells stably transfected with the introduced nucleic acid can be identified by drug selection (e.g., cells that have incorporated the selectable marker gene will survive, while the other cells die).

[0247] A host cell of the invention, such as a prokaryotic or eukaryotic host cell in culture, can be used to produce (i.e., express) NOVX protein. Accordingly, the invention further provides methods for producing NOVX protein using the host cells of the invention. In one embodiment, the method comprises culturing the host cell of invention (into which a recombinant expression vector encoding NOVX protein has been introduced) in a suitable medium such that NOVX protein is produced. In another embodiment, the method further comprises isolating NOVX protein from the medium or the host cell.

[0248] Transgenic NOVX Animals

[0249] The host cells of the invention can also be used to produce non-human transgenic animals. For example, in one embodiment, a host cell of the invention is a fertilized oocyte or an embryonic stem cell into which NOVX protein-coding sequences have been introduced. Such host cells can then be used to create non-human transgenic animals in which exogenous NOVX sequences have been introduced into their genome or homologous recombinant animals in which endogenous NOVX sequences have been altered. Such animals are useful for studying the function and/or activity of NOVX protein and for identifying and/or evaluating modulators of NOVX protein activity. As used herein, a “transgenic animal” is a non-human animal, preferably a mammal, more preferably a rodent such as a rat or mouse, in which one or more of the cells of the animal includes a transgene. Other examples of transgenic animals include non-human primates, sheep, dogs, cows, goats, chickens, amphibians, etc. A transgene is exogenous DNA that is integrated into the genome of a cell from which a transgenic animal develops and that remains in the genome of the mature animal, thereby directing the expression of an encoded gene product in one or more cell types or tissues of the transgenic animal. As used herein, a “homologous recombinant animal” is a non-human animal, preferably a mammal, more preferably a mouse, in which an endogenous NOVX gene has been altered by homologous recombination between the endogenous gene and an exogenous DNA molecule introduced into a cell of the animal, e.g., an embryonic cell of the animal, prior to development of the animal.

[0250] A transgenic animal of the invention can be created by introducing NOVX-encoding nucleic acid into the male pronuclei of a fertilized oocyte (e.g., by microinjection, retroviral infecfion) and allowing the oocyte to develop in a pseudopregnant female foster animal. The human NOVX cDNA sequences, i.e., any one of SEQ ID NO:2n−1, wherein n is an integer between 1 and 141, can be introduced as a transgene into the genome of a non-human animal. Alternatively, a non-human homologue of the human NOVX gene, such as a mouse NOVX gene, can be isolated based on hybridization to the human NOVX cDNA (described further supra) and used as a transgene. Intronic sequences and polyadenylation signals can also be included in the transgene to increase the efficiency of expression of the transgene. A tissue-specific regulatory sequence(s) can be operably-linked to the NOVX transgene to direct expression of NOVX protein to particular cells. Methods for generating transgenic animals via embryo manipulation and microinjection, particularly animals such as mice, have become conventional in the art and are described, for example, in U.S. Pat. Nos. 4,736,866; 4,870,009; and 4,873,191; and Hogan, 1986. In: MANIPULATING THE MOUSE EMBRYO, Cold Spring Harbor Laboratory Press, Cold Spring Harbor, N.Y. Similar methods are used for production of other transgenic animals. A transgenic founder animal can be identified based upon the presence of the NOVX transgene in its genome and/or expression of NOVX mRNA in tissues or cells of the animals. A transgenic founder animal can then be used to breed additional animals carrying the transgene. Moreover, transgenic animals carrying a transgene-encoding NOVX protein can further be bred to other transgenic animals carrying other transgenes.

[0251] To create a homologous recombinant animal, a vector is prepared which contains at least a portion of a NOVX gene into which a deletion, addition or substitution has been introduced to thereby alter, e.g., functionally disrupt, the NOVX gene. The NOVX gene can be a human gene (e.g., the cDNA of any one of SEQ ID NO:2n−1, wherein n is an integer between 1 and 141), but more preferably, is a non-human homologue of a human NOVX gene. For example, a mouse homologue of human NOVX gene of SEQ ID NO:2n−1, wherein n is an integer between 1 and 141, can be used to construct a homologous recombination vector suitable for altering an endogenous NOVX gene in the mouse genome. In one embodiment, the vector is designed such that, upon homologous recombination, the endogenous NOVX gene is functionally disrupted (i.e., no longer encodes a functional protein; also referred to as a “knock out” vector).

[0252] Alternatively, the vector can be designed such that, upon homologous recombination, the endogenous NOVX gene is mutated or otherwise altered but still encodes functional protein (e.g., the upstream regulatory region can be altered to thereby alter the expression of the endogenous NOVX protein). In the homologous recombination vector, the altered portion of the NOVX gene is flanked at its 5′- and 3′-termini by additional nucleic acid of the NOVX gene to allow for homologous recombination to occur between the exogenous NOVX gene carried by the vector and an endogenous NOVX gene in an embryonic stem cell. The additional flanking NOVX nucleic acid is of sufficient length for successful homologous recombination with the endogenous gene. Typically, several kilobases of flanking DNA (both at the 5′- and 3′-termini) are included in the vector. See, e.g., Thomas, et al., 1987. Cell 51: 503 for a description of homologous recombination vectors. The vector is ten introduced into an embryonic stem cell line (e.g., by electroporation) and cells in which the introduced NOVX gene has homologously-recombined with the endogenous NOVX gene are selected. See, e.g., Li, et al., 1992. Cell 69: 915.

[0253] The selected cells are then injected into a blastocyst of an animal (e.g., a mouse) to form aggregation chimeras. See, e.g., Bradley, 1987. In: TERATOCARCINOMAS AND EMBRYONIC STEM CELLS: A PRACTICAL APPROACH, Robertson, ed. IRL, Oxford, pp. 113-152. A chimeric embryo can then be implanted into a suitable pseudopregnant female foster animal and the embryo brought to term. Progeny harboring the homologously-recombined DNA in their germ cells can be used to breed animals in which all cells of the animal contain the homologously-recombined DNA by germline transmission of the transgene. Methods for constructing homologous recombination vectors and homologous recombinant animals are described further in Bradley, 1991. Curr. Opin. Biotechnol. 2: 823-829; PCT International Publication Nos.: WO 90/11354; WO 91/01140; WO 92/0968; and WO 93/04169.

[0254] In another embodiment, transgenic non-humans animals can be produced that contain selected systems that allow for regulated expression of the transgene. One example of such a system is the cre/loxP recombinase system of bacteriophage P1. For a description of the cre/loxP recombinase system, See, e.g., Lakso, et al., 1992. Proc. Natl. Acad. Sci. USA 89: 6232-6236. Another example of a recombinase system is the FLP recombinase system of Saccharomyces cerevisiae. See, O'Gorman, et al., 1991. Science 251:1351-1355. If a cre/loxP recombinase system is used to regulate expression of the transgene, animals containing transgenes encoding both the Cre recombinase and a selected protein are required. Such animals can be provided through the construction of “double” transgenic animals, e.g., by mating two transgenic animals, one containing a transgene encoding a selected protein and the other containing a transgene encoding a recombinase.

[0255] Clones of the non-human transgenic animals described herein can also be produced according to the methods described in Wilmut, et al., 1997. Nature 385: 810-813. In brief, a cell (e.g., a somatic cell) from the transgenic animal can be isolated and induced to exit the growth cycle and enter G₀ phase. The quiescent cell can then be fused, e.g., through the use of electrical pulses, to an enucleated oocyte from an animal of the same species from which the quiescent cell is isolated. The reconstructed oocyte is then cultured such that it develops to morula or blastocyte and then transferred to pseudopregnant female foster animal. The offspring borne of this female foster animal will be a clone of the animal from which the cell (e.g., the somatic cell) is isolated.

[0256] Pharmaceutical Compositions

[0257] The NOVX nucleic acid molecules, NOVX proteins, and anti-NOVX antibodies (also referred to herein as “active compounds”) of the invention, and derivatives, fragments, analogs and homologs thereof, can be incorporated into pharmaceutical compositions suitable for administration. Such compositions typically comprise the nucleic acid molecule, protein, or antibody and a pharmaceutically acceptable carrier. As used herein, “pharmaceutically acceptable carrier” is intended to include any and all solvents, dispersion media, coatings, antibacterial and antifungal agents, isotonic and absorption delaying agents, and the like, compatible with pharmaceutical administration. Suitable carriers are described in the most recent edition of Remington's Pharmaceutical Sciences, a standard reference text in the field, which is incorporated herein by reference. Preferred examples of such carriers or diluents include, but are not limited to, water, saline, finger's solutions, dextrose solution, and 5% human serum albumin. Liposomes and non-aqueous vehicles such as fixed oils may also be used. The use of such media and agents for pharmaceutically active substances is well known in the art. Except insofar as any conventional media or agent is incompatible with the active compound, use thereof in the compositions is contemplated. Supplementary active compounds can also be incorporated into the compositions.

[0258] A pharmaceutical composition of the invention is formulated to be compatible with its intended route of administration. Examples of routes of administration include parenteral, e.g., intravenous, intradermal, subcutaneous, oral (e.g., inhalation), transdermal (i.e., topical), transmucosal, and rectal administration. Solutions or suspensions used for parenteral, intradermal, or subcutaneous application can include the following components: a sterile diluent such as water for injection, saline solution, fixed oils, polyethylene glycols, glycerine, propylene glycol or other synthetic solvents; antibacterial agents such as benzyl alcohol or methyl parabens; antioxidants such as ascorbic acid or sodium bisulfite; chelating agents such as ethylenediaminetetraacetic acid (EDTA); buffers such as acetates, citrates or phosphates, and agents for the adjustment of tonicity such as sodium chloride or dextrose. The pH can be adjusted with acids or bases, such as hydrochloric acid or sodium hydroxide. The parenteral preparation can be enclosed in ampoules, disposable syringes or multiple dose vials made of glass or plastic.

[0259] Pharmaceutical compositions suitable for injectable use include sterile aqueous solutions (where water soluble) or dispersions and sterile powders for the extemporaneous preparation of sterile injectable solutions or dispersion. For intravenous administration, suitable carriers include physiological saline, bacteriostatic water, Cremophor EL™ (BASF, Parsippany, N.J.) or phosphate buffered saline (PBS). In all cases, the composition must be sterile and should be fluid to the extent that easy syringeability exists. It must be stable under the conditions of manufacture and storage and must be preserved against the contaminating action of microorganisms such as bacteria and fungi. The carrier can be a solvent or dispersion medium containing, for example, water, ethanol, polyol (for example, glycerol, propylene glycol, and liquid polyethylene glycol, and the like), and suitable mixtures thereof. The proper fluidity can be maintained, for example, by the use of a coating such as lecithin, by the maintenance of the required particle size in the case of dispersion and by the use of surfactants. Prevention of the action of microorganisms can be achieved by various antibacterial and antifungal agents, for example, parabens, chlorobutanol, phenol, ascorbic acid, thimerosal, and the like. In many cases, it will be preferable to include isotonic agents, for example, sugars, polyalcohols such as manitol, sorbitol, sodium chloride in the composition. Prolonged absorption of the injectable compositions can be brought about by including in the composition an agent which delays absorption, for example, aluminum monostearate and gelatin.

[0260] Sterile injectable solutions can be prepared by incorporating the active compound (e.g., a NOVX protein or anti-NOVX antibody) in the required amount in an appropriate solvent with one or a combination of ingredients enumerated above, as required, followed by filtered sterilization. Generally, dispersions are prepared by incorporating the active compound into a sterile vehicle that contains a basic dispersion medium and the required other ingredients from those enumerated above. In the case of sterile powders for the preparation of sterile injectable solutions, methods of preparation are vacuum drying and freeze-drying that yields a powder of the active ingredient plus any additional desired ingredient from a previously sterile-filtered solution thereof.

[0261] Oral compositions generally include an inert diluent or an edible carrier. They can be enclosed in gelatin capsules or compressed into tablets. For the purpose of oral therapeutic administration, the active compound can be incorporated with excipients and used in the form of tablets, troches, or capsules. Oral compositions can also be prepared using a fluid carrier for use as a mouthwash, wherein the compound in the fluid carrier is applied orally and swished and expectorated or swallowed. Pharmaceutically compatible binding agents, and/or adjuvant materials can be included as part of the composition. The tablets, pills, capsules, troches and the like can contain any of the following ingredients, or compounds of a similar nature: a binder such as microcrystalline cellulose, gum tragacanth or gelatin; an excipient such as starch or lactose, a disintegrating agent such as alginic acid, Primogel, or corn starch; a lubricant such as magnesium stearate or Sterotes; a glidant such as colloidal silicon dioxide; a sweetening agent such as sucrose or saccharin; or a flavoring agent such as peppermint, methyl salicylate, or orange flavoring.

[0262] For administration by inhalation, the compounds are delivered in the form of an aerosol spray from pressured container or dispenser which contains a suitable propellant, e.g., a gas such as carbon dioxide, or a nebulizer.

[0263] Systemic administration can also be by transmucosal or transdermal means. For transmucosal or transdermal administration, penetrants appropriate to the barrier to be permeated are used in the formulation. Such penetrants are generally known in the art, and include, for example, for transmucosal administration, detergents, bile salts, and fusidic acid derivatives. Transmucosal administration can be accomplished through the use of nasal sprays or suppositories. For transdermal administration, the active compounds are formulated into ointments, salves, gels, or creams as generally known in the art.

[0264] The compounds can also be prepared in the form of suppositories (e.g., with conventional suppository bases such as cocoa butter and other glycerides) or retention enemas for rectal delivery.

[0265] In one embodiment, the active compounds are prepared with carriers that will protect the compound against rapid elimination from the body, such as a controlled release formulation, including implants and microencapsulated delivery systems. Biodegradable, biocompatible polymers can be used, such as ethylene vinyl acetate, polyanhydrides, polyglycolic acid, collagen, polyorthoesters, and polylactic acid. Methods for preparation of such formulations will be apparent to those skilled in the art. The materials can also be obtained commercially from Alza Corporation and Nova Pharmaceuticals, Inc. Liposomal suspensions (including liposomes targeted to infected cells with monoclonal antibodies to viral antigens) can also be used as pharmaceutically acceptable carriers. These can be prepared according to methods known to those skilled in the art, for example, as described in U.S. Pat. No. 4,522,811.

[0266] It is especially advantageous to formulate oral or parenteral compositions in dosage unit form for ease of administration and uniformity of dosage. Dosage unit form as used herein refers to physically discrete units suited as unitary dosages for the subject to be treated; each unit containing a predetermined quantity of active compound calculated to produce the desired therapeutic effect in association with the required pharmaceutical carrier. The specification for the dosage unit forms of the invention are dictated by and directly dependent on the unique characteristics of the active compound and the particular therapeutic effect to be achieved, and the limitations inherent in the art of compounding such an active compound for the treatment of individuals.

[0267] The nucleic acid molecules of the invention can be inserted into vectors and used as gene therapy vectors. Gene therapy vectors can be delivered to a subject by, for example, intravenous injection, local administration (see, e.g., U.S. Pat. No. 5,328,470) or by stereotactic injection (see, e.g., Chen, et al., 1994. Proc. Natl. Acad. Sci. USA 91: 3054-3057). The pharmaceutical preparation of the gene therapy vector can include the gene therapy vector in an acceptable diluent, or can comprise a slow release matrix in which the gene delivery vehicle is imbedded. Alternatively, where the complete gene delivery vector can be produced intact from recombinant cells, e.g., retroviral vectors, the pharmaceutical preparation can include one or more cells that produce the gene delivery system.

[0268] The pharmaceutical compositions can be included in a container, pack, or dispenser together with instructions for administration.

[0269] Screening and Detection Methods

[0270] The isolated nucleic acid molecules of the invention can be used to express NOVX protein (e.g., via a recombinant expression vector in a host cell in gene therapy applications), to detect NOVX mRNA (e.g., in a biological sample) or a genetic lesion in a NOVX gene, and to modulate NOVX activity, as described further, below. In addition, the NOVX proteins can be used to screen drugs or compounds that modulate the NOVX protein activity or expression as well as to treat disorders characterized by insufficient or excessive production of NOVX protein or production of NOVX protein forms that have decreased or aberrant activity compared to NOVX wild-type protein (e.g.; diabetes (regulates insulin release); obesity (binds and transport lipids); metabolic disturbances associated with obesity, the metabolic syndrome X as well as anorexia and wasting disorders associated with chronic diseases and various cancers, and infectious disease(possesses anti-microbial activity) and the various dyslipidemias. In addition, the anti-NOVX antibodies of the invention can be used to detect and isolate NOVX proteins and modulate NOVX activity. In yet a further aspect, the invention can be used in methods to influence appetite, absorption of nutrients and the disposition of metabolic substrates in both a positive and negative fashion.

[0271] The invention further pertains to novel agents identified by the screening assays described herein and uses thereof for treatments as described, supra.

[0272] Screening Assays

[0273] The invention provides a method (also referred to herein as a “screening assay”) for identifying modulators, i.e., candidate or test compounds or agents (e.g., peptides, peptidomimetics, small molecules or other drugs) that bind to NOVX proteins or have a stimulatory or inhibitory effect on, e.g., NOVX protein expression or NOVX protein activity. The invention also includes compounds identified in the screening assays described herein.

[0274] In one embodiment, the invention provides assays for screening candidate or test compounds which bind to or modulate the activity of the membrane-bound form of a NOVX protein or polypeptide or biologically-active portion thereof. The test compounds of the invention can be obtained using any of the numerous approaches in combinatorial library methods known in the art, including: biological libraries; spatially addressable parallel solid phase or solution phase libraries; synthetic library methods requiring deconvolution; the “one-bead one-compound” library method; and synthetic library methods using affinity chromatography selection. The biological library approach is limited to peptide libraries, while the other four approaches are applicable to peptide, non-peptide oligomer or small molecule libraries of compounds. See, e.g., Lam, 1997. Anticancer Drug Design 12: 145.

[0275] A “small molecule” as used herein, is meant to refer to a composition that has a molecular weight of less than about 5 kD and most preferably less than about 4 kD. Small molecules can be, e.g., nucleic acids, peptides, polypeptides, peptidomimetics, carbohydrates, lipids or other organic or inorganic molecules. Libraries of chemical and/or biological mixtures, such as fungal, bacterial, or algal extracts, are known in the art and can be screened with any of the assays of the invention.

[0276] Examples of methods for the synthesis of molecular libraries can be found in the art, for example in: DeWitt, et al., 1993. Proc. Natl. Acad. Sci. U.S.A. 90: 6909; Erb, et al., 1994. Proc. Natl. Acad. Sci. U.S.A. 91: 11422; Zuckermann, et al., 1994. J. Med. Chem. 37: 2678; Cho, et al., 1993. Science 261: 1303; Carrell, et al., 1994. Angew. Chem. Int. Ed. Engl. 33: 2059; Carell, et al., 1994. Angew. Chem. Int. Ed. Engl. 33: 2061; and Gallop, et al., 1994. J. Med. Chem. 37: 1233.

[0277] Libraries of compounds may be presented in solution (e.g., Houghten, 1992. Biotechniques 13: 412-421), or on beads (Lam, 1991. Nature 354: 82-84), on chips (Fodor, 1993. Nature 364: 555-556), bacteria (Ladner, U.S. Pat. No. 5,223,409), spores (Ladner, U.S. Pat. No. 5,233,409), plasmids (Cull, et al., 1992. Proc. Natl. Acad. Sci. USA 89: 1865-1869) or on phage (Scott and Smith, 1990. Science 249: 386-390; Devlin, 1990. Science 249: 404-406; Cwirla, et al., 1990. Proc. Natl. Acad. Sci. U.S.A. 87: 6378-6382; Felici, 1991. J. Mol. Biol. 222: 301-310; Ladner, U.S. Pat. No. 5,233,409.).

[0278] In one embodiment, an assay is a cell-based assay in which a cell which expresses a membrane-bound form of NOVX protein, or a biologically-active portion thereof, on the cell surface is contacted with a test compound and the ability of the test compound to bind to a NOVX protein determined. The cell, for example, can of mammalian origin or a yeast cell. Determining the ability of the test compound to bind to the NOVX protein can be accomplished, for example, by coupling the test compound with a radioisotope or enzymatic label such that binding of the test compound to the NOVX protein or biologically-active portion thereof can be determined by detecting the labeled compound in a complex. For example, test compounds can be labeled with ¹²⁵I, ³⁵S, ¹⁴C, or ³H, either directly or indirectly, and the radioisotope detected by direct counting of radioemission or by scintillation counting. Alternatively, test compounds can be enzymatically-labeled with, for example, horseradish peroxidase, alkaline phosphatase, or luciferase, and the enzymatic label detected by determination of conversion of an appropriate substrate to product. In one embodiment, the assay comprises contacting a cell which expresses a membrane-bound form of NOVX protein, or a biologically-active portion thereof, on the cell surface with a known compound which binds NOVX to form an assay mixture, contacting the assay mixture with a test compound, and determining the ability of the test compound to interact with a NOVX protein, wherein determining the ability of the test compound to interact with a NOVX protein comprises determining the ability of the test compound to preferentially bind to NOVX protein or a biologically-active portion thereof as compared to the known compound.

[0279] In another embodiment, an assay is a cell-based assay comprising contacting a cell expressing a membrane-bound form of NOVX protein, or a biologically-active portion thereof, on the cell surface with a test compound and determining the ability of the test compound to modulate (e.g., stimulate or inhibit) the activity of the NOVX protein or biologically-active portion thereof. Determining the ability of the test compound to modulate the activity of NOVX or a biologically-active portion thereof can be accomplished, for example, by determining the ability of the NOVX protein to bind to or interact with a NOVX target molecule. As used herein, a “target molecule” is a molecule with which a NOVX protein binds or interacts in nature, for example, a molecule on the surface of a cell which expresses a NOVX interacting protein, a molecule on the surface of a second cell, a molecule in the extracellular milieu, a molecule associated with the internal surface of a cell membrane or a cytoplasmic molecule. A NOVX target molecule can be a non-NOVX molecule or a NOVX protein or polypeptide of the invention. In one embodiment, a NOVX target molecule is a component of a signal transduction pathway that facilitates transduction of an extracellular signal (e.g. a signal generated by binding of a compound to a membrane-bound NOVX molecule) through the cell membrane and into the cell. The target, for example, can be a second intercellular protein that has catalytic activity or a protein that facilitates the association of downstream signaling molecules with NOVX.

[0280] Determining the ability of the NOVX protein to bind to or interact with a NOVX target molecule can be accomplished by one of the methods described above for determining direct binding. In one embodiment, determining the ability of the NOVX protein to bind to or interact with a NOVX target molecule can be accomplished by determining the activity of the target molecule. For example, the activity of the target molecule can be determined by detecting induction of a cellular second messenger of the target (i.e. intracellular Ca²⁺ diacylglycerol, IP₃, etc.), detecting catalytic/enzymatic activity of the target an appropriate substrate, detecting the induction of a reporter gene (comprising a NOVX-responsive regulatory element operatively linked to a nucleic acid encoding a detectable marker, e.g., luciferase), or detecting a cellular response, for example, cell survival, cellular differentiation, or cell proliferation.

[0281] In yet another embodiment, an assay of the invention is a cell-free assay comprising contacting a NOVX protein or biologically-active portion thereof with a test compound and determining the ability of the test compound to bind to the NOVX protein or biologically-active portion thereof. Binding of the test compound to the NOVX protein can be determined either directly or indirectly as described above. In one such embodiment, the assay comprises contacting the NOVX protein or biologically-active portion thereof with a known compound which binds NOVX to form an assay mixture, contacting the assay mixture with a test compound, and determining the ability of the test compound to interact with a NOVX protein, wherein determining the ability of the test compound to interact with a NOVX protein comprises determining the ability of the test compound to preferentially bind to NOVX or biologically-active portion thereof as compared to the known compound.

[0282] In still another embodiment, an assay is a cell-free assay comprising contacting NOVX protein or biologically-active portion thereof with a test compound and determining the ability of the test compound to modulate (e.g. stimulate or inhibit) the activity of the NOVX protein or biologically-active portion thereof. Determining the ability of the test compound to modulate the activity of NOVX can be accomplished, for example, by determining the ability of the NOVX protein to bind to a NOVX target molecule by one of the methods described above for determining direct binding. In an alternative embodiment, determining the ability of the test compound to modulate the activity of NOVX protein can be accomplished by determining the ability of the NOVX protein further modulate a NOVX target molecule. For example, the catalytic/enzymatic activity of the target molecule on an appropriate substrate can be determined as described, supra.

[0283] In yet another embodiment, the cell-free assay comprises contacting the NOVX protein or biologically-active portion thereof with a known compound which binds NOVX protein to form an assay mixture, contacting the assay mixture with a test compound, and determining the ability of the test compound to interact with a NOVX protein, wherein determining the ability of the test compound to interact with a NOVX protein comprises determining the ability of the NOVX protein to preferentially bind to or modulate the activity of a NOVX target molecule.

[0284] The cell-free assays of the invention are amenable to use of both the soluble form or the membrane-bound form of NOVX protein. In the case of cell-free assays comprising the membrane-bound form of NOVX protein, it may be desirable to utilize a solubilizing agent such that the membrane-bound form of NOVX protein is maintained in solution. Examples of such solubilizing agents include non-ionic detergents such as n-octylglucoside, n-dodecylglucoside, n-dodecylmaltoside, octanoyl-N-methylglucamide, decanoyl-N-methylglucamide, Triton® X-100, Triton® X-114, Thesit®, Isotridecypoly(ethylene glycol ether)ₙ, N-dodecyl-N,N-dimethyl-3-ammonio-1-propane sulfonate, 3-(3-cholamidopropyl) dimethylamminiol-1-propane sulfonate (CHAPS), or 3-(3-cholamidopropyl)dimethylamminiol-2-hydroxy-1-propane sulfonate (CHAPSO).

[0285] In more than one embodiment of the above assay methods of the invention, it may be desirable to immobilize either NOVX protein or its target molecule to facilitate separation of complexed from uncomplexed forms of one or both of the proteins, as well as to accommodate automation of the assay. Binding of a test compound to NOVX protein, or interaction of NOVX protein with a target molecule in the presence and absence of a candidate compound, can be accomplished in any vessel suitable for containing the reactants. Examples of such vessels include microtiter plates, test tubes, and micro-centrifuge tubes. In one embodiment, a fusion protein can be provided that adds a domain that allows one or both of the proteins to be bound to a matrix. For example, GST-NOVX fusion proteins or GST-target fusion proteins can be adsorbed onto glutathione sepharose beads (Sigma Chemical, St. Louis, Mo.) or glutathione derivatized microtiter plates, that are then combined with the test compound or the test compound and either the non-adsorbed target protein or NOVX protein, and the mixture is incubated under conditions conducive to complex formation (e.g., at physiological conditions for salt and pH). Following incubation, the beads or microtiter plate wells are washed to remove any unbound components, the matrix immobilized in the case of beads, complex determined either directly or indirectly, for example, as described, supra. Alternatively, the complexes can be dissociated from the matrix, and the level of NOVX protein binding or activity determined using standard techniques.

[0286] Other techniques for immobilizing proteins on matrices can also be used in the screening assays of the invention. For example, either the NOVX protein or its target molecule can be immobilized utilizing conjugation of biotin and streptavidin. Biotinylated NOVX protein or target molecules can be prepared from biotin-NHS (N-hydroxy-succinimide) using techniques well-known within the art (e.g., biotinylation kit, Pierce Chemicals, Rockford, Ill.), and immobilized in the wells of streptavidin-coated 96 well plates (Pierce Chemical). Alternatively, antibodies reactive with NOVX protein or target molecules, but which do not interfere with binding of the NOVX protein to its target molecule, can be derivatized to the wells of the plate, and unbound target or NOVX protein trapped in the wells by antibody conjugation. Methods for detecting such complexes, in addition to those described above for the GST-immobilized complexes, include immunodetection of complexes using antibodies reactive with the NOVX protein or target molecule, as well as enzyme-linked assays that rely on detecting an enzymatic activity associated with the NOVX protein or target molecule.

[0287] In another embodiment, modulators of NOVX protein expression are identified in a method wherein a cell is contacted with a candidate compound and the expression of NOVX mRNA or protein in the cell is determined. The level of expression of NOVX mRNA or protein in the presence of the candidate compound is compared to the level of expression of NOVX mRNA or protein in the absence of the candidate compound. The candidate compound can then be identified as a modulator of NOVX mRNA or protein expression based upon this comparison. For example, when expression of NOVX mRNA or protein is greater (i.e., statistically significantly greater) in the presence of the candidate compound than in its absence, the candidate compound is identified as a stimulator of NOVX mRNA or protein expression. Alternatively, when expression of NOVX mRNA or protein is less (statistically significantly less) in the presence of the candidate compound than in its absence, the candidate compound is identified as an inhibitor of NOVX mRNA or protein expression. The level of NOVX mRNA or protein expression in the cells can be determined by methods described herein for detecting NOVX mRNA or protein.

[0288] In yet another aspect of the invention, the NOVX proteins can be used as “bait proteins” in a two-hybrid assay or three hybrid assay (see, e.g., U.S. Pat. No. 5,283,317; Zervos, et al., 1993. Cell 72: 223-232; Madura, et al., 1993. J. Biol. Chem. 268: 12046-12054; Bartel, et al., 1993. Biotechniques 14: 920-924; Iwabuchi, et al., 1993. Oncogene 8: 1693-1696; and Brent WO 94/10300), to identify other proteins that bind to or interact with NOVX (“NOVX-binding proteins” or “NOVX-bp”) and modulate NOVX activity. Such NOVX-binding proteins are also involved in the propagation of signals by the NOVX proteins as, for example, upstream or downstream elements of the NOVX pathway.

[0289] The two-hybrid system is based on the modular nature of most transcription factors, which consist of separable DNA-binding and activation domains. Briefly, the assay utilizes two different DNA constructs. In one construct, the gene that codes for NOVX is fused to a gene encoding the DNA binding domain of a known transcription factor (e.g., GAL-4). In the other construct, a DNA sequence, from a library of DNA sequences, that encodes an unidentified protein (“prey” or “sample”) is fused to a gene that codes for the activation domain of the known transcription factor. If the “bait” and the “prey” proteins are able to interact, in vivo, forming a NOVX-dependent complex, the DNA-binding and activation domains of the transcription factor are brought into close proximity. This proximity allows transcription of a reporter gene (e.g., LacZ) that is operably linked to a transcriptional regulatory site responsive to the transcription factor. Expression of the reporter gene can be detected and cell colonies containing the functional transcription factor can be isolated and used to obtain the cloned gene that encodes the protein which interacts with NOVX.

[0290] The invention further pertains to novel agents identified by the aforementioned screening assays and uses thereof for treatments as described herein.

[0291] Detection Assays

[0292] Portions or fragments of the cDNA sequences identified herein (and the corresponding complete gene sequences) can be used in numerous ways as polynucleotide reagents. By way of example, and not of limitation, these sequences can be used to: (i) map their respective genes on a chromosome; and, thus, locate gene regions associated with genetic disease; (ii) identify an individual from a minute biological sample (tissue typing); and (iii) aid in forensic identification of a biological sample. Some of these applications are described in the subsections, below.

[0293] Chromosome Mapping

[0294] Once the sequence (or a portion of the sequence) of a gene has been-isolated, this sequence can be used to map the location of the gene on a chromosome. This process is called chromosome mapping. Accordingly, portions or fragments of the NOVX sequences of SEQ ID NO:2n−1, wherein n is an integer between 1 and 141, or fragments or derivatives thereof, can be used to map the location of the NOVX genes, respectively, on a chromosome. The mapping of the NOVX sequences to chromosomes is an important first step in correlating these sequences with genes associated with disease.

[0295] Briefly, NOVX genes can be mapped to chromosomes by preparing PCR primers (preferably 15-25 bp in length) from the NOVX sequences. Computer analysis of the NOVX, sequences can be used to rapidly select primers that do not span more than one exon in the genomic DNA, thus complicating the amplification process. These primers can then be used for PCR screening of somatic cell hybrids containing individual human chromosomes. Only those hybrids containing the human gene corresponding to the NOVX sequences will yield an amplified fragment.

[0296] Somatic cell hybrids are prepared by fusing somatic cells from different mammals (e.g., human and mouse cells). As hybrids of human and mouse cells grow and divide, they gradually lose human chromosomes in random order, but retain the mouse chromosomes. By using media in which mouse cells cannot grow, because they lack a particular enzyme, but in which human cells can, the one human chromosome that contains the gene encoding the needed enzyme will be retained. By using various media, panels of hybrid cell lines can be established. Each cell line in a panel contains either a single human chromosome or a small number of human chromosomes, and a full set of mouse chromosomes, allowing easy mapping of individual genes to specific human chromosomes. See, e.g., D'Eustachio, et al., 1983. Science 220: 919-924. Somatic cell hybrids containing only fragments of human chromosomes can also be produced by using human chromosomes with translocations and deletions.

[0297] PCR mapping of somatic cell hybrids is a rapid procedure for assigning a particular sequence to a particular chromosome. Three or more sequences can be assigned per day using a single thermal cycler. Using the NOVX sequences to design oligonucleotide primers, sub-localization can be achieved with panels of fragments from specific chromosomes.

[0298] Fluorescence in situ hybridization (FISH) of a DNA sequence to a metaphase chromosomal spread can further be used to provide a precise chromosomal location in one step. Chromosome spreads can be made using cells whose division has been blocked in metaphase by a chemical like colcemid that disrupts the mitotic spindle. The chromosomes can be treated briefly with trypsin, and then stained with Giemsa. A pattern of light and dark bands develops on each chromosome, so that the chromosomes can be identified individually. The FISH technique can be used with a DNA sequence as short as 500 or 600 bases. However, clones larger than 1,000 bases have a higher likelihood of binding to a unique chromosomal location with sufficient signal intensity for simple detection. Preferably 1,000 bases, and more preferably 2,000 bases, will suffice to get good results at a reasonable amount of time. For a review of this technique, see, Verma, et al., HUMAN CHROMOSOMES: A MANUAL OF BASIC TECHNIQUES (Pergamon Press, New York 1988).

[0299] Reagents for chromosome mapping can be used individually to mark a single chromosome or a single site on that chromosome, or panels of reagents can be used for marking multiple sites and/or multiple chromosomes. Reagents corresponding to noncoding regions of the genes actually are preferred for mapping purposes. Coding sequences are more likely to be conserved within gene families, thus increasing the chance of cross hybridizations during chromosomal mapping.

[0300] Once a sequence has been mapped to a precise chromosomal location, the physical position of the sequence on the chromosome can be correlated with genetic map data. Such data are found, e.g., in McKusick, MENDELIAN INHERITANCE IN MAN, available on-line through Johns Hopkins University Welch Medical Library). The relationship between genes and disease, mapped to the same chromosomal region, can then be identified through linkage analysis (co-inheritance of physically adjacent genes), described in, e.g., Egeland, et al., 1987. Nature, 325: 783-787.

[0301] Moreover, differences in the DNA sequences between individuals affected and unaffected with a disease associated with the NOVX gene, can be determined. If a mutation is observed in some or all of the affected individuals but not in any unaffected individuals, then the mutation is likely to be the causative agent of the particular disease. Comparison of affected and unaffected individuals generally involves first looking for structural alterations in the chromosomes, such as deletions or translocations that are visible from chromosome spreads or detectable using PCR based on that DNA sequence. Ultimately, complete sequencing of genes from several individuals can be performed to confirm the presence of a mutation and to distinguish mutations from polymorphisms.

[0302] Tissue Typing

[0303] The NOVX sequences of the invention can also be used to identify individuals from minute biological samples. In this technique, an individual's genomic DNA is digested with one or more restriction enzymes, and probed on a Southern blot to yield unique bands for identification. The sequences of the invention are useful as additional DNA markers for RFLP (“restriction fragment length polymorphisms,” described in U.S. Pat. No. 5,272,057).

[0304] Furthermore, the sequences of the invention can be used to provide an alternative technique that determines the actual base-by-base DNA sequence of selected portions of an individual's genome. Thus, the NOVX sequences described herein can be used to prepare two PCR primers from the 5′- and 3′-termini of the sequences. These primers can then be used to amplify an individual's DNA and subsequently sequence it.

[0305] Panels of corresponding DNA sequences from individuals, prepared in this manner, can provide unique individual identifications, as each individual will have a unique set of such DNA sequences due to allelic differences. The sequences of the invention can be used to obtain such identification sequences from individuals and from tissue. The NOVX sequences of the invention uniquely represent portions of the human genome. Allelic variation occurs to some degree in the coding regions of these sequences, and to a greater degree in the noncoding regions. It is estimated that allelic variation between individual humans occurs with a frequency of about once per each 500 bases. Much of the allelic variation is due to single nucleotide polymorphisms (SNPs), which include restriction fragment length polymorphisms (RFLPs).

[0306] Each of the sequences described herein can, to some degree, be used as a standard against which DNA from an individual can be compared for identification purposes. Because greater numbers of polymorphisms occur in the noncoding regions, fewer sequences are necessary to differentiate individuals. The noncoding sequences can comfortably provide positive individual identification with a panel of perhaps 10 to 1,000 primers that each yield a noncoding amplified sequence of 100 bases. If coding sequences, such as those of SEQ ID NO:2n−1, wherein n is an integer between 1 and 141, are used, a more appropriate number of primers for positive individual identification would be 500-2,000.

[0307] Predictive Medicine

[0308] The invention also pertains to the field of predictive medicine in which diagnostic assays, prognostic assays, pharmacogenomics, and monitoring clinical trials are used for prognostic (predictive) purposes to thereby treat an individual prophylactically. Accordingly, one aspect of the invention relates to diagnostic assays for determining NOVX protein and/or nucleic acid expression as well as NOVX activity, in the context of a biological sample (e.g., blood, serum, cells, tissue) to thereby determine whether an individual is afflicted with a disease or disorder, or is at risk of developing a disorder, associated with aberrant NOVX expression or activity. The disorders include metabolic disorders, diabetes, obesity, infectious disease, anorexia, cancer-associated cachexia, cancer, neurodegenerative disorders, Alzheimer's Disease, Parkinson's Disorder, immune disorders, and hematopoietic disorders, and the various dyslipidemias, metabolic disturbances associated with obesity, the metabolic syndrome X and wasting disorders associated with chronic diseases and various cancers. The invention also provides for prognostic (or predictive) assays for determining whether an individual is at risk of developing a disorder associated with NOVX protein, nucleic acid expression or activity. For example, mutations in a NOVX gene can be assayed in a biological sample. Such assays can be used for prognostic or predictive purpose to thereby prophylactically treat an individual prior to the onset of a disorder characterized by or associated with NOVX protein, nucleic acid expression, or biological activity.

[0309] Another aspect of the invention provides methods for determining NOVX protein, nucleic acid expression or activity in an individual to thereby select appropriate therapeutic or prophylactic agents for that individual (referred to herein as “pharmacogenomics”). Pharmacogenomics allows for the selection of agents (e.g., drugs) for therapeutic or prophylactic treatment of an individual based on the genotype of the individual (e.g., the genotype of the individual examined to determine the ability of the individual to respond to a particular agent.)

[0310] Yet another aspect of the invention pertains to monitoring the influence of agents (e.g., drugs, compounds) on the expression or activity of NOVX in clinical trials.

[0311] These and other agents are described in further detail in the following sections.

[0312] Diagnostic Assays

[0313] An exemplary method for detecting the presence or absence of NOVX in a biological sample involves obtaining a biological sample from a test subject and contacting the biological sample with a compound or an agent capable of detecting NOVX protein or nucleic acid (e.g., mRNA, genomic DNA) that encodes NOVX protein such that the presence of NOVX is detected in the biological sample. An agent for detecting NOVX mRNA or genomic DNA is a labeled nucleic acid probe capable of hybridizing to NOVX mRNA or genomic DNA. The nucleic acid probe can be, for example, a full-length NOVX nucleic acid, such as the nucleic acid of SEQ ID NO:2n−1, wherein n is an integer between 1 and 141, or a portion thereof, such as an oligonucleotide of at least 15, 30, 50, 100, 250 or 500 nucleotides in length and sufficient to specifically hybridize under stringent conditions to NOVX mRNA or genomic DNA. Other suitable probes for use in the diagnostic assays of the invention are described herein.

[0314] An agent for detecting NOVX protein is an antibody capable of binding to NOVX protein, preferably an antibody with a detectable label. Antibodies can be polyclonal, or more preferably, monoclonal. An intact antibody, or a fragment thereof (e.g., Fab or F(ab′)₂) can be used. The term “labeled”, with regard to the probe or antibody, is intended to encompass direct labeling of the probe or antibody by coupling (i.e., physically linking) a detectable substance to the probe or antibody, as well as indirect labeling of the probe or antibody by reactivity with another reagent that is directly labeled. Examples of indirect labeling include detection of a primary antibody using a fluorescently-labeled secondary antibody and end-labeling of a DNA probe with biotin such that it can be detected with fluorescently-labeled streptavidin. The term “biological sample” is intended to include tissues, cells and biological fluids isolated from a subject, as well as tissues, cells and fluids present within a subject. That is, the detection method of the invention can be used to detect NOVX mRNA, protein, or genomic DNA in a biological sample in vitro as well as in vivo. For example, in vitro techniques for detection of NOVX mRNA include Northern hybridizations and in situ hybridizations. In vitro techniques for detection of NOVX protein include enzyme linked immunosorbent assays (ELISAs), Western blots, immunoprecipitations, and immunofluorescence. In vitro techniques for detection of NOVX genomic DNA include Southern hybridizations. Furthermore, in vivo techniques for detection of NOVX protein include introducing into a subject a labeled anti-NOVX antibody. For example, the antibody can be labeled with a radioactive marker whose presence and location in a subject can be detected by standard imaging techniques.

[0315] In one embodiment, the biological sample contains protein molecules from the test subject. Alternatively, the biological sample can contain mRNA molecules from the test subject or genomic DNA molecules from the test subject. A preferred biological sample is a peripheral blood leukocyte sample isolated by conventional means from a subject.

[0316] In another embodiment, the methods further involve obtaining a control biological sample from a control subject, contacting the control sample with a compound or agent capable of detecting NOVX protein, mRNA, or genomic DNA, such that the presence of NOVX protein, mRNA or genomic DNA is detected in the biological sample, and comparing the presence of NOVX protein, mRNA or genomic DNA in the control sample with the presence of NOVX protein, mRNA or genomic DNA in the test sample.

[0317] The invention also encompasses kits for detecting the presence of NOVX in a biological sample. For example, the kit can comprise: a labeled compound or agent capable of detecting NOVX protein or mRNA in a biological sample; means for determining the amount of NOVX in the sample; and means for comparing the amount of NOVX in the sample with a standard. The compound or agent can be packaged in a suitable container. The kit can further comprise instructions for using the kit to detect NOVX protein or nucleic acid.

[0318] Prognostic Assays

[0319] The diagnostic methods described herein can furthermore be utilized to identifpy subjects having or at risk of developing a disease or disorder associated with aberrant NOVX expression or activity. For example, the assays described herein, such as the preceding diagnostic assays or the following assays, can be utilized to identify a subject having or at risk of developing a disorder associated with NOVX protein, nucleic acid expression or activity. Alternatively, the prognostic assays can be utilized to identify a subject having or at risk for developing a disease or disorder. Thus, the invention provides a method for identifying a disease or disorder associated with aberrant NOVX expression or activity in which a test sample is obtained from a subject and NOVX protein or nucleic acid (e.g., mRNA, genomic DNA) is detected, wherein the presence of NOVX protein or nucleic acid is diagnostic for a subject having or at risk of developing a disease or disorder associated with aberrant NOVX expression or activity. As used herein, a “test sample” refers to a biological sample obtained from a subject of interest. For example, a test sample can be a biological fluid (e.g., serum), cell sample, or tissue.

[0320] Furthermore, the prognostic assays described herein can be used to determine whether a subject can be administered an agent (e.g., an agonist, antagonist, peptidomimetic, protein, peptide, nucleic acid, small molecule, or other drug candidate) to treat a disease or disorder associated with aberrant NOVX expression or activity. For example, such methods can be used to determine whether a subject can be effectively treated with an agent for a disorder. Thus, the invention provides methods for determining whether a subject can be effectively treated with an agent for a disorder associated with aberrant NOVX expression or activity in which a test sample is obtained and NOVX protein or nucleic acid is detected (e.g., wherein the presence of NOVX protein or nucleic acid is diagnostic for a subject that can be administered the agent to treat a disorder associated with aberrant NOVX expression or activity).

[0321] The methods of the invention can also be used to detect genetic lesions in a NOVX gene, thereby determining if a subject with the lesioned gene is at risk for a disorder characterized by aberrant cell proliferation and/or differentiation. In various embodiments, the methods include detecting, in a sample of cells from the subject, the presence or absence of a genetic lesion characterized by at least one of an alteration affecting the integrity of a gene encoding a NOVX-protein, or the misexpression of the NOVX gene. For example, such genetic lesions can be detected by ascertaining the existence of at least one of: (i) a deletion of one or more nucleotides from a NOVX gene; (ii) an addition of one or more nucleotides to a NOVX gene; (iii) a substitution of one or more nucleotides of a NOVX gene, (iv) a chromosomal rearrangement of a NOVX gene; (v) an alteration in the level of a messenger RNA transcript of a NOVX gene, (vi) aberrant modification of a NOVX gene, such as of the methylation pattern of the genomic DNA, (vii) the presence of a non-wild-type splicing pattern of a messenger RNA transcript of a NOVX gene, (viii) a non-wild-type level of a NOVX protein, (ix) allelic loss of a NOVX gene, and (x) inappropriate post-translational modification of a NOVX protein. As described herein, there are a large number of assay techniques known in the art which can be used for detecting lesions in a NOVX gene. A preferred biological sample is a peripheral blood leukocyte sample isolated by conventional means from a subject. However, any biological sample containing nucleated cells may be used, including, for example, buccal mucosal cells.

[0322] In certain embodiments, detection of the lesion involves the use of a probe/primer in a polymerase chain reaction (PCR) (see, e.g., U.S. Pat. Nos. 4,683,195 and 4,683,202), such as anchor PCR or RACE PCR, or, alternatively, in a ligation chain reaction (LCR) (see, e.g., Landegran, et al., 1988. Science 241: 1077-1080; and Nakazawa, et al., 1994. Proc. Natl. Acad. Sci. USA 91: 360-364), the latter of which can be particularly useful for detecting point mutations in the NOVX-gene (see, Abravaya, et al., 1995. Nucl. Acids Res. 23: 675-682). This method can include the steps of collecting a sample of cells from a patient, isolating nucleic acid (e.g., genomic, mRNA or both) from the cells of the sample, contacting the nucleic acid sample with one or more primers that specifically hybridize to a NOVX gene under conditions such that hybridization and amplification of the NOVX gene (if present) occurs, and detecting the presence or absence of an amplification product, or detecting the size of the amplification product and comparing the length to a control sample. It is anticipated that PCR and/or LCR may be desirable to use as a preliminary amplification step in conjunction with any of the techniques used for detecting mutations described herein.

[0323] Alternative amplification methods include: self sustained sequence replication (see, Guatelli, et al., 1990. Proc. Natl. Acad. Sci. USA 87: 1874-1878), transcriptional amplification system (see, Kwoh, et al., 1989. Proc. Natl. Acad. Sci. USA 86: 1173-1177); Qβ Replicase (see, Lizardi, et al, 1988. BioTechnology 6: 1197), or any other nucleic acid amplification method, followed by the detection of the amplified molecules using techniques well known to those of skill in the art. These detection schemes are especially useful for the detection of nucleic acid molecules if such molecules are present in very low numbers.

[0324] In an alternative embodiment, mutations in a NOVX gene from a sample cell can be identified by alterations in restriction enzyme cleavage patterns. For example, sample and control DNA is isolated, amplified (optionally), digested with one or more restriction endonucleases, and fragment length sizes are determined by gel electrophoresis and compared. Differences in fragment length sizes between sample and control DNA indicates mutations in the sample DNA. Moreover, the use of sequence specific ribozymes (see, e.g., U.S. Pat. No. 5,493,531) can be used to score for the presence of specific mutations by development or loss of a ribozyme cleavage site.

[0325] In other embodiments, genetic mutations in NOVX can be identified by hybridizing a sample and control nucleic acids, e.g., DNA or RNA, to high-density arrays containing hundreds or thousands of oligonucleotides probes. See, e.g., Cronin, et al., 1996. Human Mutation 7: 244-255; Kozal, et al., 1996. Nat. Med. 2: 753-759. For example, genetic mutations in NOVX can be identified in two dimensional arrays containing light-generated DNA probes as described in Cronin, et al., supra. Briefly, a first hybridization array of probes can be used to scan through long stretches of DNA in a sample and control to identify base changes between the sequences by making linear arrays of sequential overlapping probes. This step allows the identification of point mutations. This is followed by a second hybridization array that allows the characterization of specific mutations by using smaller, specialized probe arrays complementary to all variants or mutations detected. Each mutation array is composed of parallel probe sets, one complementary to the wild-type gene and the other complementary to the mutant gene.

[0326] In yet another embodiment, any of a variety of sequencing reactions known in the art can be used to directly sequence the NOVX gene and detect mutations by comparing the sequence of the sample NOVX with the corresponding wild-type (control) sequence. Examples of sequencing reactions include those based on techniques developed by Maxim and Gilbert, 1977. Proc. Natl. Acad. Sci. USA 74: 560 or Sanger, 1977. Proc. Natl. Acad. Sci. USA 74: 5463. It is also contemplated that any of a variety of automated sequencing procedures can be utilized when performing the diagnostic assays (see, e.g., Naeve, et al., 1995. Biotechniques 19: 448), including sequencing by mass spectrometry (see, e.g., PCT International Publication No. WO 94/16101; Cohen, et al., 1996. Adv. Chromatography 36: 127-162; and Griffin, et al., 1993. Appl. Biochem. Biotechnol. 38: 147-159).

[0327] Other methods for detecting mutations in the NOVX gene include methods in which protection from cleavage agents is used to detect mismatched bases in RNA/RNA or RNA/DNA heteroduplexes. See, e.g., Myers, et al., 1985. Science 230: 1242. In general, the art technique of “mismatch cleavage” starts by providing heteroduplexes of formed by hybridizing (labeled) RNA or DNA containing the wild-type NOVX sequence with potentially mutant RNA or DNA obtained from a tissue sample. The double-stranded duplexes are treated with an agent that cleaves single-stranded regions of the duplex such as which will exist due to basepair mismatches between the control and sample strands. For instance, RNA/DNA duplexes can be treated with RNase and DNA/DNA hybrids treated with S₁ nuclease to enzymatically digesting the mismatched regions. In other embodiments, either DNA/DNA or RNA/DNA duplexes can be treated with hydroxylamine or osmium tetroxide and with piperidine in order to digest mismatched regions. After digestion of the mismatched regions, the resulting material is then separated by size on denaturing polyacrylamide gels to determine the site of mutation. See, e.g., Cotton, et al., 1988. Proc. Natl. Acad. Sci. USA 85: 4397; Saleeba, et al., 1992. Methods Enzymol. 217: 286-295. In an embodiment, the control DNA or RNA can be labeled for detection.

[0328] In still another embodiment, the mismatch cleavage reaction employs one or more proteins that recognize mismatched base pairs in double-stranded DNA (so called “DNA mismatch repair” enzymes) in defined systems for detecting and mapping point mutations in NOVX cDNAs obtained from samples of cells. For example, the mutY enzyme of E. coli cleaves A at G/A mismatches and the thymidine DNA glycosylase from HeLa cells cleaves T at G/T mismatches. See, e.g., Hsu, et al., 1994. Carcinogenesis 15: 1657-1662. According to an exemplary embodiment, a probe based on a NOVX sequence, e.g., a wild-type NOVX sequence, is hybridized to a cDNA or other DNA product from a test cell(s). The duplex is treated with a DNA mismatch repair enzyme, and the cleavage products, if any, can be detected from electrophoresis protocols or the like. See, e.g., U.S. Pat. No. 5,459,039.

[0329] In other embodiments, alterations in electrophoretic mobility will be used to identify mutations in NOVX genes. For example, single strand conformation polymorphism (SSCP) may be used to detect differences in electrophoretic mobility between mutant and wild type nucleic acids. See, e.g., Orita, et al., 1989. Proc. Natl. Acad. Sci. USA: 86: 2766; Cotton, 1993. Mutat. Res. 285: 125-144; Hayashi, 1992. Genet. Anal. Tech. Appl. 9: 73-79. Single-stranded DNA fragments of sample and control NOVX nucleic acids will be denatured and allowed to renature. The secondary structure of single-stranded nucleic acids varies according to sequence, the resulting alteration in electrophoretic mobility enables the detection of even a single base change. The DNA fragments may be labeled or detected with labeled probes. The sensitivity of the assay may be enhanced by using RNA (rather than DNA), in which the secondary structure is more sensitive to a change in sequence. In one embodiment, the subject method utilizes heteroduplex analysis to separate double stranded heteroduplex molecules on the basis of changes in electrophoretic mobility. See, e.g., Keen, et al., 1991. Trends Genet. 7: 5.

[0330] In yet another embodiment, the movement of mutant or wild-type fragments in polyacrylamide gels containing a gradient of denaturant is assayed using denaturing gradient gel electrophoresis (DGGE). See, e.g., Myers, et al., 1985. Nature 313: 495. When DGGE is used as the method of analysis, DNA will be modified to insure that it does not completely denature, for example by adding a GC clamp of approximately 40 bp of high-melting GC-rich DNA by PCR. In a further embodiment, a temperature gradient is used in place of a denaturing gradient to identify differences in the mobility of control and sample DNA. See, e.g., Rosenbaum and Reissner, 1987. Biophys. Chem. 265: 12753.

[0331] Examples of other techniques for detecting point mutations include, but are not limited to, selective oligonucleotide hybridization, selective amplification, or selective primer extension. For example, oligonucleotide primers may be prepared in which the known mutation is placed centrally and then hybridized to target DNA under conditions that permit hybridization only if a perfect match is found. See, e.g., Saiki, et al., 1986. Nature 324: 163; Saiki, et al., 1989. Proc. Natl. Acad. Sci. USA 86: 6230. Such allele specific oligonucleotides are hybridized to PCR amplified target DNA or a number of different mutations when the oligonucleotides are attached to the hybridizing membrane and hybridized with labeled target DNA.

[0332] Alternatively, allele specific amplification technology that depends on selective PCR amplification may be used in conjunction with the instant invention. Oligonucleotides used as primers for specific amplification may carry the mutation of interest in the center of the molecule (so that amplification depends on differential hybridization; see, e.g., Gibbs, et al., 1989. Nucl. Acids Res. 17: 2437-2448) or at the extreme 3′-terminus of one primer where, under appropriate conditions, mismatch can prevent, or reduce polymerase extension (see, e.g., Prossner, 1993. Tibtech. 11: 238). In addition it may be desirable to introduce a novel restriction site in the region of the mutation to create cleavage-based detection. See, e.g., Gasparini, et al., 1992. Mol. Cell Probes 6: 1. It is anticipated that in certain embodiments amplification may also be performed using Taq ligase for amplification. See, e.g., Barany, 1991. Proc. Natl. Acad. Sci. USA 88: 189. In such cases, ligation will occur only if there is a perfect match at the 3′-terminus of the 5′ sequence, making it possible to detect the presence of a known mutation at a specific site by looking for the presence or absence of amplification.

[0333] The methods described herein may be performed, for example, by utilizing pre-packaged diagnostic kits comprising at least one probe nucleic acid or antibody reagent described herein, which may be conveniently used, e.g., in clinical settings to diagnose patients exhibiting symptoms or family history of a disease or illness involving a NOVX gene.

[0334] Furthermore, any cell type or tissue, preferably peripheral blood leukocytes, in which NOVX is expressed may be utilized in the prognostic assays described herein. However, any biological sample containing nucleated cells may be used, including, for example, buccal mucosal cells.

[0335] Pharmacogenomics

[0336] Agents, or modulators that have a stimulatory or inhibitory effect on NOVX activity (e.g., NOVX gene expression), as identified by a screening assay described herein can be administered to individuals to treat (prophylactically or therapeutically) disorders. The disorders include but are not limited to, e.g., those diseases, disorders and conditions listed above, and more particularly include those diseases, disorders, or conditions associated with homologs of a NOVX protein, such as those summarized in Table A.

[0337] In conjunction with such treatment, the pharmacogenomics (i.e., the study of the relationship between an individual's genotype and that individual's response to a foreign compound or drug) of the individual may be considered. Differences in metabolism of therapeutics can lead to severe toxicity or therapeutic failure by altering the relation between dose and blood concentration of the pharmacologically active drug. Thus, the pharmacogenomics of the individual permits the selection of effective agents (e.g., drugs) for prophylactic or therapeutic treatments based on a consideration of the individual's genotype. Such pharmacogenomics can further be used to determine appropriate dosages and therapeutic regimens. Accordingly, the activity of NOVX protein, expression of NOVX nucleic acid, or mutation content of NOVX genes in an individual can be determined to thereby select appropriate agent(s) for therapeutic or prophylactic treatment of the individual.

[0338] Pharmacogenomics deals with clinically significant hereditary variations in the response to drugs due to altered drug disposition and abnormal action in affected persons. See e.g., Eichelbaum, 1996. Clin. Exp. Pharmacol. Physiol., 23: 983-985; Linder, 1997. Clin. Chem., 43: 254-266. In general, two types of pharmacogenetic conditions can be differentiated. Genetic conditions transmitted as a single factor altering the way drugs act on the body (altered drug action) or genetic conditions transmitted as single factors altering the way the body acts on drugs (altered drug metabolism). These pharmacogenetic conditions can occur either as rare defects or as polymorphisms. For example, glucose-6-phosphate dehydrogenase (G6PD) deficiency is a common inherited enzymopathy in which the main clinical complication is hemolysis after ingestion of oxidant drugs (anti-malarials, sulfonamides, analgesics, nitrofurans) and consumption of fava beans.

[0339] As an illustrative embodiment, the activity of drug metabolizing enzymes is a major determinant of both the intensity and duration of drug action. The discovery of genetic polymorphisms of drug metabolizing enzymes (e.g., N-acetyltransferase 2 (NAT 2) and cytochrome pregnancy zone protein precursor enzymes CYP2D6 and CYP2C19) has provided an explanation as to why some patients do not obtain the expected drug effects or show exaggerated drug response and serious toxicity after taking the standard and safe dose of a drug. These polymorphisms are expressed in two phenotypes in the population, the extensive metabolizer (EM) and poor metabolizer (PM). The prevalence of PM is different among different populations. For example, the gene coding for CYP2D6 is highly polymorphic and several mutations have been identified in PM, which all lead to the absence of functional CYP2D6. Poor metabolizers of CYP2D6 and CYP2C19 quite frequently experience exaggerated drug response and side effects when they receive standard doses. If a metabolite is the active therapeutic moiety, PM show no therapeutic response, as demonstrated for the analgesic effect of codeine mediated by its CYP2D6-formed metabolite morphine. At the other extreme are the so called ultra-rapid metabolizers who do not respond to standard doses. Recently, the molecular basis of ultra-rapid metabolism has been identified to be due to CYP2D6 gene amplification.

[0340] Thus, the activity of NOVX protein, expression of NOVX nucleic acid, or mutation content of NOVX genes in an individual can be determined to thereby select appropriate agent(s) for therapeutic or prophylactic treatment of the individual. In addition, pharmacogenetic studies can be used to apply genotyping of polymorphic alleles encoding drug-metabolizing enzymes to the identification of an individual's drug responsiveness phenotype. This knowledge, when applied to dosing or drug selection, can avoid adverse reactions or therapeutic failure and thus enhance therapeutic or prophylactic efficiency when treating a subject with a NOVX modulator, such as a modulator identified by one of the exemplary screening assays described herein.

[0341] Monitoring of Effects During Clinical Trials

[0342] Monitoring the influence of agents (e.g., drugs, compounds) on the expression or activity of NOVX (e.g., the ability to modulate aberrant cell proliferation and/or differentiation) can be applied not only in basic drug screening, but also in clinical trials. For example, the effectiveness of an agent determined by a screening assay as described herein to increase NOVX gene expression, protein levels, or upregulate NOVX activity, can be monitored in clinical trails of subjects exhibiting decreased NOVX gene expression, protein levels, or downregulated NOVX activity. Alternatively, the effectiveness of an agent determined by a screening assay to decrease NOVX gene expression, protein levels, or downregulate NOVX activity, can be monitored in clinical trails of subjects exhibiting increased NOVX gene expression, protein levels, or upregulated NOVX activity. In such clinical trials, the expression or activity of NOVX and, preferably, other genes that have been implicated in, for example, a cellular proliferation or immune disorder can be used as a “read out” or markers of the immune responsiveness of a particular cell.

[0343] By way of example, and not of limitation, genes, including NOVX, that are modulated in cells by treatment with an agent (e.g., compound, drug or small molecule) that modulates NOVX activity (e.g., identified in a screening assay as described herein) can be identified. Thus, to study the effect of agents on cellular proliferation disorders, for example, in a clinical trial, cells can be isolated and RNA prepared and analyzed for the levels of expression of NOVX and other genes implicated in the disorder. The levels of gene expression (i.e., a gene expression pattern) can be quantified by Northern blot analysis or RT-PCR, as described herein, or alternatively by measuring the amount of protein produced, by one of the methods as described herein, or by measuring the levels of activity of NOVX or other genes. In this manner, the gene expression pattern can serve as a marker, indicative of the physiological response of the cells to the agent. Accordingly, this response state may be determined before, and at various points during, treatment of the individual with the agent.

[0344] In one embodiment, the invention provides a method for monitoring the effectiveness of treatment of a subject with an agent (e.g., an agonist, antagonist, protein, peptide, peptidomimetic, nucleic acid, small molecule, or other drug candidate identified by the screening assays described herein) comprising the steps of (i) obtaining a pre-administration sample from a subject prior to administration of the agent; (ii) detecting the level of expression of a NOVX protein, mRNA, or genomic DNA in the preadministration sample; (iii) obtaining one or more post-administration samples from the subject; (iv) detecting the level of expression or activity of the NOVX protein, mRNA, or genomic DNA in the post-administration samples; (v) comparing the level of expression or activity of the NOVX protein, mRNA, or genomic DNA in the pre-administration sample with the NOVX protein, mRNA, or genomic DNA in the post administration sample or samples; and (vi) altering the administration of the agent to the subject accordingly. For example, increased administration of the agent may be desirable to increase the expression or activity of NOVX to higher levels than detected, i.e., to increase the effectiveness of the agent. Alternatively, decreased administration of the agent may be desirable to decrease expression or activity of NOVX to lower levels than detected, i.e., to decrease the effectiveness of the agent.

[0345] Methods of Treatment

[0346] The invention provides for both prophylactic and therapeutic methods of treating a subject at risk of (or susceptible to) a disorder or having a disorder associated with aberrant NOVX expression or activity. The disorders include but are not limited to, e.g., those diseases, disorders and conditions listed above, and more particularly include those diseases, disorders, or conditions associated with homologs of a NOVX protein, such as those summarized in Table A.

[0347] These methods of treatment will be discussed more fully, below.

[0348] Diseases and Disorders

[0349] Diseases and disorders that are characterized by increased (relative to a subject not suffering from the disease or disorder) levels or biological activity may be treated with Therapeutics that antagonize (i.e., reduce or inhibit) activity. Therapeutics that antagonize activity may be administered in a therapeutic or prophylactic manner. Therapeutics that may be utilized include, but are not limited to: (i) an aforementioned peptide, or analogs, derivatives, fragments or homologs thereof; (ii) antibodies to an aforementioned peptide; (iii) nucleic acids encoding an aforementioned peptide; (iv) administration of antisense nucleic acid and nucleic acids that are “dysfunctional” (i.e., due to a heterologous insertion within the coding sequences of coding sequences to an aforementioned peptide) that are utilized to “knockout” endogenous function of an aforementioned peptide by homologous recombination (see, e.g., Capecchi, 1989. Science 244: 1288-1292); or (v) modulators (i.e., inhibitors, agonists and antagonists, including additional peptide mimetic of the invention or antibodies specific to a peptide of the invention) that alter the interaction between an aforementioned peptide and its binding partner.

[0350] Diseases and disorders that are characterized by decreased (relative to a subject not suffering from the disease or disorder) levels or biological activity may be treated with Therapeutics that increase (i.e., are agonists to) activity. Therapeutics that upregulate activity may be administered in a therapeutic or prophylactic manner. Therapeutics that may be utilized include, but are not limited to, an aforementioned peptide, or analogs, derivatives, fragments or homologs thereof; or an agonist that increases bioavailability.

[0351] Increased or decreased levels can be readily detected by quantifying peptide and/or RNA, by obtaining a patient tissue sample (e.g., from biopsy tissue) and assaying it in vitro for RNA or peptide levels, structure and/or activity of the expressed peptides (or mRNAs of an aforementioned peptide). Methods that are well-known within the art include, but are not limited to, immunoassays (e.g., by Western blot analysis, immunoprecipitation followed by sodium dodecyl sulfate (SDS) polyacrylamide gel electrophoresis, immunocytochemistry, etc.) and/or hybridization assays to detect expression of mRNAs (e.g., Northern assays, dot blots, in situ hybridization, and the like).

[0352] Prophylactic Methods

[0353] In one aspect, the invention provides a method for preventing, in a subject, a disease or condition associated with an aberrant NOVX expression or activity, by administering to the subject an agent that modulates NOVX expression or at least one NOVX activity. Subjects at risk for a disease that is caused or contributed to by aberrant NOVX expression or activity can be identified by, for example, any or a combination of diagnostic or prognostic assays as described herein. Administration of a prophylactic agent can occur prior to the manifestation of symptoms characteristic of the NOVX aberrancy, such that a disease or disorder is prevented or, alternatively, delayed in its progression. Depending upon the type of NOVX aberrancy, for example, a NOVX agonist or NOVX antagonist agent can be used for treating the subject. The appropriate agent can be determined based on screening assays described herein. The prophylactic methods of the invention are further discussed in the following subsections.

[0354] Therapeutic Methods

[0355] Another aspect of the invention pertains to methods of modulating NOVX expression or activity for therapeutic purposes. The modulatory method of the invention involves contacting a cell with an agent that modulates one or more of the activities of NOVX protein activity associated with the cell. An agent that modulates NOVX protein activity can be an agent as described herein, such as a nucleic acid or a protein, a naturally-occurring cognate ligand of a NOVX protein, a peptide, a NOVX peptidomimetic, or other small molecule. In one embodiment, the agent stimulates one or more NOVX protein activity. Examples of such stimulatory agents include active NOVX protein and a nucleic acid molecule encoding NOVX that has been introduced into the cell. In another embodiment, the agent inhibits one or more NOVX protein activity. Examples of such inhibitory agents include antisense NOVX nucleic acid molecules and anti-NOVX antibodies. These modulatory methods can be performed in vitro (e.g., by culturing the cell with the agent) or, alternatively, in vivo (e.g., by administering the agent to a subject). As such, the invention provides methods of treating an individual afflicted with a disease or disorder characterized by aberrant expression or activity of a NOVX protein or nucleic acid molecule. In one embodiment, the method involves administering an agent (e.g., an agent identified by a screening assay described herein), or combination of agents that modulates (e.g., up-regulates or down-regulates) NOVX expression or activity. In another embodiment, the method involves administering a NOVX protein or nucleic acid molecule as therapy to compensate for reduced or aberrant NOVX expression or activity.

[0356] Stimulation of NOVX activity is desirable in situations in which NOVX is abnormally downregulated and/or in which increased NOVX activity is likely to have a beneficial effect. One example of such a situation is where a subject has a disorder characterized by aberrant cell proliferation and/or differentiation (e.g., cancer or immune associated disorders). Another example of such a situation is where the subject has a gestational disease (e.g., preclampsia).

[0357] Determination of the Biological Effect of the Therapeutic

[0358] In various embodiments of the invention, suitable in vitro or in vivo assays are performed to determine the effect of a specific Therapeutic and whether its administration is indicated for treatment of the affected tissue.

[0359] In various specific embodiments, in vitro assays may be performed with representative cells of the type(s) involved in the patient's disorder, to determine if a given Therapeutic exerts the desired effect upon the cell type(s). Compounds for use in therapy may be tested in suitable animal model systems including, but not limited to rats, mice, chicken, cows, monkeys, rabbits, and the like, prior to testing in human subjects. Similarly, for in vivo testing, any of the animal model system known in the art may be used prior to administration to human subjects.

[0360] Prophylactic and Therapeutic Uses of the Compositions of the Invention

[0361] The NOVX nucleic acids and proteins of the invention are useful in potential prophylactic and therapeutic applications implicated in a variety of disorders. The disorders include but are not limited to, e.g., those diseases, disorders and conditions listed above, and more particularly include those diseases, disorders, or conditions associated with homologs of a NOVX protein, such as those summarized in Table A.

[0362] As an example, a cDNA encoding the NOVX protein of the invention may be useful in gene therapy, and the protein may be useful when administered to a subject in need thereof. By way of non-limiting example, the compositions of the invention will have efficacy for treatment of patients suffering from diseases, disorders, conditions and the like, including but not limited to those listed herein.

[0363] Both the novel nucleic acid encoding the NOVX protein, and the NOVX protein of the invention, or fragments thereof, may also be useful in diagnostic applications, wherein the presence or amount of the nucleic acid or the protein are to be assessed. A further use could be as an anti-bacterial molecule (i.e., some peptides have been found to possess anti-bacterial properties). These materials are further useful in the generation of antibodies, which immunospecifically-bind to the novel substances of the invention for use in therapeutic or diagnostic methods.

[0364] The invention will be further described in the following examples, which do not limit the scope of the invention described in the claims.

### EXAMPLES

### Example A

### Polynucleotide and Polypeptide Sequences, and Homology Data

### Example 1

[0365] The NOV1 clone was analyzed, and the nucleotide and encoded polypeptide sequences are shown in Table 1A.

TABLE 1A
NOV1 Sequence Analysis

| | |
|---|---|
| SEQ ID NO: 1 | 968 bp |

| | |
|---|---|
| NOV1a, | ATGGGTCTGGCCATGGAGCAGCTGTCCGGGCTGAGGCGGAGCCGGGCGTTTCTCGCCC |
| CG103134-01 DNA | |
| Sequence | TGCTGGGATCGCTGCTCCTCTCTGGGGTCCTGGCGGCCGACCGAGAACGCAGCATCCA |
| | CGACTTCTGCCTGGTGTCGAAGGTGGTGGGCAGATGCCGGGCCTCCATGCCTAGGTGG |
| | TGGTACAATGTCACTGACGGATCCTGCCAGCTGTTTGTGTATGGGGGCTGTGACGGAA |
| | ACAGCAATAATTACCTGACCAAGGAGGAGTGCCTCAAGAAATGTGCCACTGTCACAGA |
| | GAATGCCACGGGTGACCTGGCCACCAGCAGGAATGCAGCGGATTCCTCTGTCCCAAGT |
| | GCTCCCAGAAGGCAGGATTCTGAAGACCACTCCAGCGATATGTTCAACTATGAAGAAT |
| | ACTGCACCGCCAACGCAGTCACTGGGCCTTGCCGTGCATCCTTCCCACCCTGGTACTT |
| | TGACGTGGAGAGGAACTCCTGCAATAACTTCATCTATGGAGGCTGCCGGGGCAATAAG |
| | AACAGCTACCGCTCTGAGGAGGCCTGCATGCTCCGCTGCTTCCGCCAGCAGGAGAATC |
| | CTCCCCTGCCCCTTGGCTCAAAGGTGGTGGTTCTGGCGGGGCTGTTCGTGATGGTGTT |
| | GATCCTCTTCCTGGGAGCCTCCATGGTCTACCTGATCCGGGTGGCACGGAGGAGCCAG |
| | GAGCGTGCCCTGCGCACCGTCTGGAGCTCCGGAGATGACAAGGAGCAGCTGGTGAAGA |
| | ACACATATGTCCTGTGACCGCCCTGTCGCCAAGAGGACTGGGGAAGGGAGGGGAGACT |
| | ATGTGTGAGCTTTTTTTAAATAGAGGGATTGACTCGGATTTGAGTGATCATTAGGGCT |
| | GAGGTCTGTTTCTCTGGGAGCTAGGACGGCTGCTTCCTGGTCTGGCAGGCATGGGTTT |
| | GCTTTGGAAATCCTCTACGAGGCTCCGGCACTGACCTAAG |

| | |
|---|---|
| ORF Start: ATG at 1 | ORF Stop: TGA at 769 |

| | | |
|---|---|---|
| SEQ ID NO: 2 | 256 aa | MW at 28631.3 kD |

| | |
|---|---|
| NOV1a, | MGLAMEQLCGLRRSRAFLALLGSLLLSGVLAADRERSIHDFCLVSKVVGRCRASMPRW |
| CG103134-01 | |
| Protein Sequence | WYNVTDGSCQLFVYGGCDGNSNNYLTKEECLKKCATVTENATCDLATSRNAADSSVPS |
| | APRRQDSEDHSSDMFNYEEYCTANAVTGPCRASFPRWYFDVERNSCNNFIYGCCRGNK |
| | NSYRSEEACMLRCFRQQENPPLPLGSKVVVLAGLFVMVLILFLGASMVYLIRVARRSQ |
| | ERALRTVWSSGDDKEQLVKNTYVL |

| | |
|---|---|
| SEQ ID NO: 3 | 869 bp |

| | |
|---|---|
| NOV1b, | GAGACCCCAACGGCTGGTGGCGTCGCCTGCGCGTCTCGGCTGAGCTGGCCATGGCGCA |
| CG103134-02 DNA | |
| Sequence | GCTGTGCGGGCTGAGGCGGAGCCGGGCGTTTCTCGCCCTGCTCGGATCGCTGCTCCTC |
| | TCTGGGGTCCTGGCGGCCGACCGAGAACGCAGCATCCACGGTGAGGGCCGGGCGGACT |
| | TCTGCCTGGTGTCGAAGGTGGTGGGCAGATGCCGGGCCTCCATGCCTAGGTGGTGGCA |
| | CAATGTCACTGACGGATCCTGCCAGCTGTTTGTGTATGGGGGCTGTGACGGAAACAGC |
| | AATAATTACCTGACCAAGGAGGAGTGCCTCAAGAAATGTGCCACTGTCACACAGAATG |
| | CCACGGGTGACCTGGCCACCAGCAGGAATGCAGCGGATTCCTCTGTCCCAAGTGCTCC |
| | CAGAACGCAGGATTCTGAAGACCACTCCAGCGATATGTTCAACTATGAAGAATACTGC |
| | ACCGCCAACGCAGTCACTGCGCCTTGCCGTGCATCCTTCCCACGCTGGTACTTTGACG |
| | TGGAGAGGAACTCCTGCAATAACTTCATCTATGGAGGCTGCCGGGGCAATAAGAACAG |
| | CTACCGCTCTGAGGAGGCCTGCATGCTCCCCTGCTTCCGCCAGCAGGAGAATCCTCCC |
| | CTGCCCCTTGGCTCAAAGGTGGTGGTTCTGGCGGGGCTGTTCGTGATGGTGTTGATCC |
| | TCTTCCTGGGAGCCTCCATGGTCTACCTGATCCGGGTGGCACGGAGGAACCAGGACCG |
| | TGCCCTGCGCACCGTCTGGAGCTCCGGAGATGACAAGGAGCAGCTGGTGAAGAACACA |
| | TATGTCCTGTGACCGGCCTGTCGCCAAGAGGACTGGGGAAGGGAGGGGAGACTATGG |

| | |
|---|---|
| ORF Start: ATG at 51 | ORF Stop: TGA at 822 |

| | | |
|---|---|---|
| SEQ ID NO: 4 | 257 aa | MW at 28672.2 kD |

| | |
|---|---|
| NOV1b, | MAQLCGLRRSRAFLALLGSLLLSGVLAADRERSIHGEGRADFCLVSKVVGRCRASMPR |
| CG103134-02 | |
| Protein Sequence | WWHNVTDGSCQLFVYGGCDGNSNNYLTKEECLKKCATVTENATGDLATSRNAADSSVP |
| | SAPRRQDSEDHSSDMFNYEEYCTANAVTGPCRASFPRWYFDVERNSCNNFIYGGCRGN |
| | KNSYRSEEACMLRCFRQQENPPLPLGSKVVVLAGLFVMVLILFLGASMVYLIRVARRN |
| | QERALRTVWSSGDDKEQLVKNTYVL |

[0366] Sequence comparison of the above protein sequences yields the following sequence relationships shown in Table 1B.

TABLE 1B
Comparison of NOV1a against NOV1b.

| | | Identities/ |
|---|---|---|
| | NOV1a Residues/ | Similarities for |
| Protein Sequence | Match Residues | the Matched Region |
| NOV1b | 5 . . . 256 | 249/257 (96%) |
| | 1 . . . 257 | 251/257 (96%) |

[0367] Further analysis of the NOV1a protein yielded the following properties shown in Table 1C.

TABLE 1C
Protein Sequence Properties NOV1a

| | |
|---|---|
| PSort | 0.8705 probability located in mitochondrial |
| analysis: | inner membrane; 0.6000 probability located |
| | in plasma membrane; 0.4983 probability located |
| | in mitochondrial intermembrane space; |
| | 0.4000 probability located in Golgi body |
| SignalP | Cleavage site between residues 32 and 33 |
| analysis: | |

[0368] A search of the NOV1a protein against the Geneseq database, a proprietary database that contains sequences published in patents and patent publication, yielded several homologous proteins shown in Table 1D.

TABLE 1D
Geneseq Results for NOV1a

| | | NOV1a | Identities/ | |
|---|---|---|---|---|
| | | Residues/ | Similarities | |
| Geneseq | Protein/Organism/Length | Match | for the | Expect |
| Identifier | [Patent #, Date] | Residues | Matched Region | Value |
| ABP41951 | Human ovarian antigen | 3 . . . 256 | 252/254 (99%) | e−148 |
| | HDABR73, SEQ ID NO: 3083 - | 17 . . . 270 | 253/254 (99%) | |
| | Homo sapiens, 270 aa. | | | |
| | [WO200200677-A1, 03 JAN. 2002] | | | |
| AAB43821 | Human cancer associated | 3 . . . 256 | 252/254 (99%) | e−148 |
| | protein sequence SEQ ID | 17 . . . 270 | 253/254 (99%) | |
| | NO: 1266 - Homo sapiens, 289 | | | |
| | aa. [WO200055350-A1, 21 SEP. | | | |
| | 2000] | | | |
| AAO17719 | Human kunitz type protease | 5 . . . 256 | 250/252 (99%) | e−148 |
| | inhibitor bikunin - Homo | 1 . . . 252 | 251/252 (99%) | |
| | sapiens, 252 aa. [WO9957274- | | | |
| | A1, 11 NOV. 1999] | | | |
| AAB14187 | Human placental bikunin | 5 . . . 256 | 250/252 (99%) | e−148 |
| | protein # 5 - Homo sapiens, | 1 . . . 252 | 251/252 (99%) | |
| | 252 aa. [WO200037099-A2, 29 | | | |
| | JUN. 2000] | | | |
| AAW70286 | Human tissue factor pathway | 5 . . . 256 | 250/252 (99%) | e−148 |
| | inhibitor-3 (TFPI-3) - Homo | 1 . . . 252 | 251/252 (99%) | |
| | sapiens, 252 aa. [WO9833920- | | | |
| | A2, 06 AUG. 1998] | | | |

[0369] In a BLAST search of public sequence datbases, the NOV1a protein was found to have homology to the proteins shown in the BLASTP data in Table 1E.

TABLE 1E
Public BLASTP Results for NOV1a

| | | | Identities/ | |
|---|---|---|---|---|
| | | NOV1a | Similarities | |
| Protein | | Residues/ | for the | |
| Accession | | Match | Matched | Expect |
| Number | Protein/Organism/Length | Residues | Portion | Value |
| O43291 | Kunitz-type protease inhibitor | 5 . . . 256 | 250/252 (99%) | e−147 |
| | 2 precursor (Hepatocyte growth | 1 . . . 252 | 251/252 (99%) | |
| | factor activator inhibitor | | | |
| | type 2) (HAI-2) (Placental | | | |
| | bikunin) - Homo sapiens | | | |
| | (Human), 252 aa. | | | |
| Q9WU03 | Kunitz-type protease inhibitor | 5 . . . 256 | 177/252 (70%) | e−102 |
| | 2 precursor (Hepatocyte growth | 1 . . . 252 | 202/252 (79%) | |
| | factor activator inhibitor | | | |
| | type 2) (HAI-2) - Mus musculus | | | |
| | (Mouse), 252 aa. | | | |
| JG0185 | hepatocyte growth factor | 5 . . . 256 | 177/252 (70%) | e−102 |
| | activator inhibitor type 2 - | 1 . . . 252 | 201/252 (79%) | |
| | mouse, 252 aa. | | | |
| AAH03431 | Serine protease inhibitor, | 95 . . . 256 | 112/162 (69%) | 3e−60 |
| | Kunitz type 2 - Mus musculus | 34 . . . 195 | 129/162 (79%) | |
| | (Mouse), 195 aa. | | | |
| Q9D8Q8 | Serine protease inhibitor, | 95 . . . 256 | 112/162 (69%) | 3e−60 |
| | kunitz type 2 - Mus musculus | 34 . . . 195 | 129/162 (79%) | |
| | (Mouse), 195 aa. | | | |

[0370] PFam analysis predicts that the NOV1a protein contains the domains shown in the Table 1F.

TABLE 1F
Domain Analysis of NOV1a

| | | Identities/ | |
|---|---|---|---|
| | NOV1a Match | Similarities for | |
| Pfam Domain | Region | the Matched Region | Expect Value |
| Kunitz_BPTI | 42 . . . 92 | 24/62 (39%) | 9.7e−28 |
| | | 45/62 (73%) | |
| Kunitz_BPTI | 137 . . . 187 | 22/62 (35%) | 2.6e−22 |
| | | 39/62 (63%) | |

### Example 2

[0371] The NOV2 clone was analyzed, and the nucleotide and encoded polypeptide sequences are shown in Table 2A.

TABLE 2A
NOV2 Sequence Analysis

| | |
|---|---|
| SEQ ID NO: 5 | 841 bp |

| | |
|---|---|
| NOV2a, | ACTGGTTTCGTGGAAGGAAGCTCCAGGACTGGCGGGATGGGCTCAGCCTGTATCAAAG |
| CG103322-01 DNA | |
| Sequence | TCACCAAATACTTTCTCTTCCTCTTCAACTTGATCTTCTTTATCCTGGGCGCAGTGAT |
| | CCTGGGCTTCGGGGTGTGGATCCTGGCCGACAAGAGCAGTTTCATCTCTGTCCTGCAA |
| | ACCTCCTCCAGCTCGCTTAGGATGGGGGCCTATGTCTTCATCGGCGTGGGGGCAGTCA |
| | CTATGCTCATGGGCTTCCTGGGCTGCATCGGCGCCGTCAACGAGGTCCGCTGCCTGCT |
| | GGGGCTGTACTTTGCTTTCCTGCTCCTGATCCTCATTGCCCACGTGACGGCCGGGGCC |
| | CTCTTCTACTTCAACATGGGCAAGCTGAAGCAGGAGATGGGCCGCATCGTGACTGAGC |
| | TCATTCGAGACTACAACAGCAGTCGCGAGGACAGCCTGCAGGATGCCTGGGACTACGT |
| | GCAGGCTCAGGTCAAGTGCTGCGGCTGGGTCAGCTTCTACAACTGGACAGACAACGCT |
| | GAGCTCATGAATCGCCCTGAGGTCACCTACCCCTGTTCCTGCGAAGTCAAGGGGGAAG |
| | AGGACAACAGCCTTTCTGTGAGGAAGCGCTTCTGCGAGGCCCCCGGCAACAGGACCCA |
| | GAGTGGCAACCACCCTGAGGACTCGCCTGTGTACCAGGAGGGCTGCATGGAGAAGGTG |
| | CAGGCGTGGCTGCAGGAGAACCTGGCCATCATCCTCGGCGTGGGCGTGGGTGTCGCCA |
| | TCGTCGAOCTCCTGGGGATGGTCCTGTCCATCTGCTTGTGCCGGCACGTCCATTCCGA |
| | ACACTACAGCAAGGTCCCCAAGTACTGAG |

| | |
|---|---|
| ORF Start: ATG at 37 | ORF Stop: TGA at 838 |

| | | |
|---|---|---|
| SEQ ID NO: 6 | 267 aa | MW at 29611.2 kD |

| | |
|---|---|
| NOV2a, | MGSACIKVTKYFLFLFNLIFFILGAVILGFGVWILADKSSFISVLQTSSSSLRMGAYV |
| CG103322-01 | |
| Protein Sequence | FIGVGAVTMLMGFLGCIGAVNEVRCLLGLYFAFLLLILIAQVTAGALFYFNMGKLKQE |
| | MGGIVTELIRDYNSSREDSLQDAWDYVQAQVKCCGWVSFYNWTDNAELMNRPEVTYPC |
| | SCEVKGEEDNSLSVRKGFCEAPCNRTQSGNHPEDWPVYQEGCMEKVQAWLQENLGIIL |
| | GVGVGVAIVELLGMVLSICLCRHVHSEDYSKVPKY |

| | |
|---|---|
| SEQ ID NO: 7 | 747 bp |

| | |
|---|---|
| NOV2b | CCTTGGGATGGGCTCAGCCTGTATCAAAGTCACCAAATACTTTCTCTTCCTCTTCAAC |
| CG103322-02 DNA | |
| Sequence | TTGATCTTCTTTATCCTGGGCGCAGTGATCCTGGGCTTCGGGGTGTGGATCCTGGCCG |
| | ACAAGAGCACTTTCATCTCTGTCCTCCAAACCTCCTCCAGCTCGCTTAGGATGGGGGC |
| | CTATGTCTTCATCGGCGTGGGGGCAGTCACTATGCTCATGGGCTTCCTGGGCTGCATC |
| | GGCGCCGTCAACGAGGTCCGCTGCCTGCTGGGGCTGTACTTTGCTTTCCTGCTCCTGA |
| | TCCTCATTGCCCAGGTGACGGCCGCGGCCCTCTTCTACTTCAACATGGGCAAGCTGAA |
| | GCAGGAGATGGGTGGCATCGTCACTGAGCTCATTCGAGACTACAACAGCAGTCGCGAG |
| | GACACCCTGCAGGATGCCTGGGACTACGTGCAGGCTCAGGTGAAGTGCTGCGGCTGGG |
| | TCAGCTTCTACAACTGGACAGACAACGCTGAGCTCATGAATCGCCCTGAGGTCACCTA |
| | CCCCTGTTCCTGCGAAGTCAAGGGGGAAGAGGACAACAGCCTTTCTGTGAGGAAGGGC |
| | TTCTGCGAGGCCCCCGGCAACAGGACCCAGAGTGGCAACCACCCTGAGGACTGGCCTG |
| | TGTACCAGGAGCTCCTGGGGATGGTCCTGTCCATCTGCTTGTGCCGGCACGTCCATTC |
| | CGAAGACTACAGCAAGGTCCCCAAGTACTGAGGCAGCTGCTATCCCCATCT |

| | |
|---|---|
| ORF Start: ATG at 8 | ORF Stop: TGA at 725 |

| | | |
|---|---|---|
| SEQ ID NO: 8 | 239 aa | MW at 26702.7 kD |

| | |
|---|---|
| NOV2b, | MGSACIKVTKYFLFLFNLIFFILGAVILGFGVWILADKSSFISVLQTSSSSLRMGAYV |
| CG103322-02 | |
| Protein Sequence | FIGVGAVTMLMGFLGCIGAVNEVRCLLGLYFAFLLLILIAQVTAGALFYFNMGKLKQE |
| | MGGIVTELIRDYNSSREDSLQDAWDYVQAQVKCCGWVSFYNWTDNAELMNRPEVTYPC |
| | SCEVKGEEDNSLSVRKGFCEAPGNRTQSGNHPEDWPVYQELLGMVLSICLCRHVHSED |
| | YSKVPKY |

[0372] Sequences comparison of the above protein sequences yields the following sequence relationships shown in Table 2B.

TABLE 2B
Comparison of NOV2a against NOV2b.

| | | Identities/ |
|---|---|---|
| Protein | NOV2a Residues/ | Similarities for |
| Sequence | Match Residues | the Matched Region |
| NOV2b | 1 . . . 267 | 239/267 (89%) |
| | 1 . . . 239 | 239/267 (89%) |

[0373] Further analysis of the NOV2a protein yielded the following properties shown in Table 2C.

TABLE 2C
Protein Sequence Properties NOV2a

| | |
|---|---|
| PSort | 0.6400 probability located in plasma membrane; |
| analysis: | 0.4600 probability located in Golgi body; 0.3700 |
| | probability located in endoplasmic reticulum |
| | (membrane); 0.1000 probability located in |
| | endoplasmic reticulum (lumen) |
| SignalP | Cleavage site between residues 37 and 38 |
| analysis: | |

[0374] A search of the NOV2a protein against the Geneseq database, a proprietary database that contains sequences published in patents and patent pulication, yielded several homologous proteins shown in Table 2D.

TABLE 2D
Geneseq Results for NOV2a

| | | NOV2a | Identities/ | |
|---|---|---|---|---|
| | | Residues/ | Similarities | |
| Geneseq | Protein/Organism/Length | Match | for the | Expect |
| Identifier | [Patent #, Date] | Residues | Matched Region | Value |
| AAM23963 | Human EST encoded protein SEQ | 1 . . . 267 | 266/267 (99%) | e−157 |
| | ID NO: 1488 - Homo sapiens, | 1 . . . 267 | 267/267 (99%) | |
| | 267 aa. [WO200154477-A2, 02 | | | |
| | AUG. 2001] | | | |
| AAW05732 | Human metastasis tumour | 1 . . . 267 | 266/267 (99%) | e−157 |
| | suppressor gene KAI1 product | 1 . . . 267 | 267/267 (99%) | |
| | [WO9634117-A1, 31 OCT. 1996] | | | |
| ABB57295 | Mouse ischaemic condition | 1 . . . 267 | 203/267 (76%) | e−120 |
| | related protein sequence SEQ | 1 . . . 266 | 230/267 (86%) | |
| | ID NO: 828 - Mus musculus, 266 | | | |
| | aa. [WO200188188-A2, 22 NOV. | | | |
| | 2001] | | | |
| AAB58792 | Breast and ovarian cancer | 1 . . . 117 | 110/117 (94%) | 4e−56 |
| | associated antigen protein | 69 . . . 185 | 112/117 (95%) | |
| | sequence SEQ ID 500 - Homo | | | |
| | sapiens, 198 aa. | | | |
| | WO200055173-A1, 21 SEP. 2000] | | | |
| AAG00436 | Human secreted protein, SEQ | 46 . . . 130 | 84/85 (98%) | 5e−41 |
| | ID NO: 4517 - Homo sapiens, | 15 . . . 99 | 85/85 (99%) | |
| | 99 aa. [EP1033401-A2, 06 SEP. | | | |
| | 2000] | | | |

[0375] In a BLAST search of public sequence datbases, the NOV2a protein was found to have homology to the proteins shown in the BLASTP data in Table 2E.

TABLE 2E
Public BLASTP Results for NOV2a

| | | NOV2a | Identities/ | |
|---|---|---|---|---|
| Protein | | Residues/ | Similarities | |
| Accession | | Match | for the Matched | Expect |
| Number | Protein/Organism/Length | Residues | Portion | Value |
| AAH00726 | Kangai 1 (suppression of | 1 . . . 267 | 267/267 (100%) | e−157 |
| | tumorigenicity 6, prostate, | 1 . . . 267 | 267/267 (100%) | |
| | CD82 antigen (R2 leukocyte | | | |
| | antigen, antigen detected by | | | |
| | monoclonal and antibody IA4)) | | | |
| | - Homo sapiens (Human), 267 | | | |
| | aa. | | | |
| P27701 | CD82 antigen (Inducible | 1 . . . 267 | 266/267 (99%) | e−157 |
| | membrane protein R2) (C33 | 1 . . . 267 | 267/267 (99%) | |
| | antigen) (IA4) (Metastasis | | | |
| | suppressor Kangai 1) | | | |
| | (Suppressor of | | | |
| | tumorigenicity-6) - Homo | | | |
| | sapiens (Human), 267 aa. | | | |
| P40237 | CD82 antigen (Inducible | 1 . . . 267 | 203/267 (76%) | e−119 |
| | membrane protein R2) (C33 | 1 . . . 266 | 230/267 (86%) | |
| | antigen) (IA4) - Mus musculus | | | |
| | (Mouse), 266 aa. | | | |
| O70352 | CD82 antigen (Metastasis | 1 . . . 267 | 202/267 (75%) | e−117 |
| | suppressor homolog) - Rattus | 1 . . . 266 | 226/267 (83%) | |
| | norvegicus (Rat), 266 aa. | | | |
| P11049 | Leukocyte antigen CD37 - Homo | 4 . . . 267 | 99/276 (35%) | 2e−45 |
| | sapiens (Human), 281 aa. | 6 . . . 280 | 159/276 (56%) | |

[0376] PFam analysis predicts that the NOV2a protein contains the domains shown in the Table 2F.

TABLE 2F
Domain Analysis of NOV2a

| | | Identities/ | |
|---|---|---|---|
| | NOV2a Match | Similarities for | |
| Pfam Domain | Region | the Matched Region | Expect Value |
| transmembrane4 | 10 . . . 256 | 102/270 (38%) | 2.6e−96 |
| | | 221/270 (82%) | |

### Example 3

[0377] The NOV3 clone was analyzed, and the nucleotide and encoded polypeptide sequences are shown in Table 3A.

TABLE 3A
NOV3 Sequence Analysis

| | |
|---|---|
| SEQ ID NO: 9 | 486 bp |

| | |
|---|---|
| NOV3a, | ATGGCAAAAGAGGAGCCCCAGAGTATCTCAAGGGACTTGCAGGAACTGCAGAAGAAGC |
| CG151575-01 DNA | |
| Sequence | TGTCTCTGCTGATAGACTCCTTCCAGAATAACTCAAAGGTGGTGGCCTTTATGAAGTC |
| | TCCAGTGGGTCAGTACTTGGACAGCCATCCGTTTCTGGCCTTCACCTTGCTGGTGTTC |
| | ATTGTCATGTCGGCCGTTCCTGTTGGATTCTTCCTGCTCATCGTGGTGCTTACCACCC |
| | TGGCTGCTCTGCTCGGGGTCATAATATTGGAAGGATTGGTCATCTCTGTGGGTGGCTT |
| | CTCACTGCTCTGCATCCTCTGTGGTTTGGGCTTCGTATCACTCGCCATGTCCGGGATG |
| | ATGATAGCATCTTATGTAGTGGTCTCCAGCCTCATCAGCTGCTGGTTTTCTCCCAGGC |
| | CACTGACACAGCAAAACACCAGTTGTGACTTTCTGCCAGCCATGAAGTCTGCAGACTT |
| | CGAGGGGCTTTACCAGGAATGA |

| | |
|---|---|
| ORF Start: ATG at 1 | ORF Stop: TGA at 484 |

| | | |
|---|---|---|
| SEQ ID NO: 10 | 161 aa | MW at 17507.6 kD |

| | |
|---|---|
| NOV3a, | MAKEEPQSISRDLQELQKKLSLLIDSFQNNSKVVAFMKSPVGQYLDSHPFLAFTLLVF |
| CG151575-01 | |
| Protein Sequence | IVMSAVPVGFFLLIVVLTTLAALLGVIILEGLVISVGGFSLLCILCGLGFVSLAMSGM |
| | MIASYVVVSSLISCWFSPRPLTQQNTSCDFLPAMKSADFEGLYQE |

| | |
|---|---|
| SEQ ID NO: 11 | 760 bp |

| | |
|---|---|
| NOV3b, | GGCTCCCTCTCGGGACGCTCTTTCCTTCTTCCTCTTGTTCCTCCTCCTGCCTCTCTTC |
| CG151575-02 DNA | |
| Sequence | GCTTCGCCTGCAAACGCGGTGGGGGCTGCTCGGCGGTCAGGAGCAGCAAGAGACAGAG |
| | CGACATGAGAGATTGGACCGCGGGCTGCACTGGACAATTTACTGGTAGGATAATTCAT |
| | CCCTAAAGAGATTGAAGTGAGCTTCAGAATGGCAAAAGAGGAGCCCCAGAGTATCTCA |
| | AGGGACTTGCAGGAACTGCACAAGAAGCTGTCTCTGCTGATAGACTCCTTCCAGAATA |
| | ACTCAAAGCTGCCCCAACACAGCAGGATCTCACTGGACTCTGATCATGGAGTGTCCAG |
| | GCTGGCCAGTGCTGGCTCCAAGGTGGTGGCCTTTATGAAGTCTCCAGTGGGTCAGTAC |
| | TTGGACAGCCATCCGTTTCTGGCCTTCACCTTGCTGGTGTTCATTGTCATGTCGGCCG |
| | TTCCTGTTGGATTCTTCCTGCTCATCGTGGTGCTTACCACCCTGGCTGCTCTGCTGGG |
| | GGTCATAATATTGGAAGGATTGGTCATCTCTGTCGGTGGCTTCTCACTGCTCTGCATC |
| | CTCTGTGGTTTGGGCTTCGTATCACTCGCCATGTCGGGGATGATGATAGCATCTTATG |
| | TAGTGGTCTCCAGCCTCATCAGCTGCTGGTTTTCTCCCAGGCCACTGACACAGCAAAA |
| | CACCAGTTGTGACTTTCTOCCAGCCATGAAGTCTGCAGACTTCGAGGGGCTTTACCAG |
| | GAATGA |

| | |
|---|---|
| ORF Start: ATG at 203 | ORF Stop: TGA at 758 |

| | | |
|---|---|---|
| SEQ ID NO: 12 | 185 aa | MW at 19972.2 kD |

| | |
|---|---|
| NOV3b, | MAKEEPQSISRDLQELQKKLSLLIDSFQNNSKLPQHSRISLDSDDGVSRLGSAGSKVV |
| CG151575-02 | |
| Protein Sequence | AFMKSPVGQYLDSHPFLAFTLLVFIVMSAVPVGFFLLIVVLTTLAALLGVIILEGLVI |
| | SVGGFSLLCILCGLGFVSLAMSGMMIASYVVVSSLISCWFSPRPLTQQNTSCDFLPAM |
| | KSADFEGLYQE |

[0378] Sequence comparison of the above protein sequences yields the following sequence relationships shown in Table 3B.

TABLE 3B
Comparison of NOV3a against NOV3b.

| | | Identities/ |
|---|---|---|
| Protein | NOV3a Residues/ | Similarities for |
| Sequence | Match Residues | the Matched Region |
| NOV3b | 1 . . . 161 | 161/185 (87%) |
| | 1 . . . 185 | 161/185 (87%) |

[0379] Further analysis of the NOV3a protein yielded the following properties shown in Table 3C.

TABLE 3C
Protein Sequence Properties NOV3a

| | |
|---|---|
| PSort | 0.6000 probability located in plasma membrane; |
| analysis: | 0.4000 probability located in Golgi body; 0.3000 |
| | probability located in endoplasmic reticulum |
| | (membrane); 0.0300 probability located in |
| | mitochondrial inner membrane |
| SignalP | Cleavage site between residues 69 and 70 |
| analysis: | |

[0380] A search of the NOV3a protein against the Geneseq database, a proprietary database that contains sequences published in patents and patent publication, yielded several homologous proteins shown in Table 3D.

TABLE 3D
Geneseq Results for NOV3a

| | | NOV3a | Identities/ | |
|---|---|---|---|---|
| | | Residues/ | Similarities | |
| Geneseq | Protein/Organism/Length | Match | for the Matched | Expect |
| Identifier | [Patent #, Date] | Residues | Region | Value |
| AAM93733 | Human polypeptide, SEQ ID | 1 . . . 161 | 161/161 (100%) | 9e−86 |
| | NO: 3697 - Homo sapiens, 161 | 1 . . . 161 | 161/161 (100%) | |
| | aa. [EP1130094-A2, 05 SEP. | | | |
| | 2001] | | | |
| ABG16996 | Novel human diagnostic | 47 . . . 133 | 24/89 (26%) | 0.93 |
| | protein #16987 - Homo | 280 . . . 366 | 53/89 (58%) | |
| | sapiens, 1076 aa. | | | |
| | [WO200175067-A2, 11 OCT. | | | |
| | 2001] | | | |
| ABP30247 | Streptococcus polypeptide | 64 . . . 114 | 23/56 (41%) | 1.2 |
| | SEQ ID NO 9670 - | 327 . . . 381 | 33/56 (58%) | |
| | Streptococcus agalactiae, | | | |
| | 401 aa. [WO200234771-A2, 02 | | | |
| | MAY 2002] | | | |
| ABP26074 | Streptococcus polypeptide | 64. .114 | 23/56 (41%) | 1.2 |
| | SEQ ID NO 1324 - | 334. .388 | 33/56 (58%) | |
| | Streptococcus agalactiae, | | | |
| | 408 aa. [WO200234771-A2, 02 | | | |
| | MAY 2002] | | | |
| ABB92972 | Herbicidally active | 58 . . . 123 | 22/68 (32%) | 3.6 |
| | polypeptide SEQ ID NO 2183 - | 175 . . . 236 | 37/68 (54%) | |
| | Arabidopsis thaliana, 436 | | | |
| | aa. [WO200210210-A2, 07 FEB. | | | |
| | 2002] | | | |

[0381] In a BLAST search of public sequence datbases, the NOV3a protein was found to have homology to the proteins shown in the BLASTP data in Table 3E.

TABLE 3E
Public BLASTP Results for NOV3a

| | | NOV3a | Identities/ | |
|---|---|---|---|---|
| Protein | | Residues/ | Similarities | |
| Accession | | Match | for the Matched | Expect |
| Number | Protein/Organism/Length | Residues | Portion | Value |
| Q96B96 | Similar to hypothetical | 1 . . . 161 | 161/161 (100%) | 3e−85 |
| | protein from clone 24796 - | 1 . . . 161 | 161/161 (100%) | |
| | Homo sapiens (Human), 161 | | | |
| | aa. | | | |
| O00323 | Hypothetical 17.6 kDa | 1 . . . 161 | 159/161 (98%) | 4e−84 |
| | protein - Homo sapiens | 1 . . . 161 | 160/161 (98%) | |
| | (Human), 161 aa. | | | |
| Q922Z1 | Similar to hypothetical | 1 . . . 158 | 112/159 (70%) | 5e−57 |
| | protein from clone 24796 - | 1 . . . 159 | 134/159 (83%) | |
| | Mus musculus (Mouse), 161 | | | |
| | aa. | | | |
| P43932 | Hypothetical protein HI0056 | 33 . . . 100 | 19/68 (27%) | 1.5 |
| | - Haemophilus influenzae, | 168 . . . 224 | 34/68 (49%) | |
| | 237 aa. | | | |
| Q9RZJ6 | Hypothetical protein | 33 . . . 96 | 20/67 (29%) | 2.0 |
| | DRB0131 - Deinococcus | 219 . . . 285 | 35/67 (51%) | |
| | radiodurans, 304 aa. | | | |

[0382] PFam analysis predicts that the NOV3a protein contains the domains shown in the Table 3F.

TABLE 3F
Domain Analysis of NOV3a

| | | | |
|---|---|---|---|
| | NOV3a Match | Identities/ for | |
| Pfam Domain | Region | the Matched Region | Expect Value |

No Significant Matches Found

### Example 4

[0383] The NOV4 clone was analyzed, and the nucleotide and encoded polypeptide sequences are shown in Table 4A.

TABLE 4A
NOV4 Sequence Analysis

| | |
|---|---|
| SEQ ID NO: 13 | 1088 bp |

| | |
|---|---|
| NOV4a, | GTGAGTTTACCCCTATGAGACTGTGAGAGOCCCGGGGCCTACCTCAAAGGAGCGGGGT |
| CG151608-01 DNA | |
| Sequence | CGCGAAGCTAGCTAGCAGCGGCCCCCCTCCAGGTCCCCGGGCCCGGCGGCGCGGCGGC |
| | GGCTTGGTTGTGAAGAGGCGGGGAAGCGGGTGTCCGGTCCCCGCCATGGAGGGCATGG |
| | ACGTAGACCTGGACCCGGAGCTGATGCAGAAGTTCAGCTGCCTGGGCACCACCGACAA |
| | GGACGTGCTCATCTCCGAGTTCCAGAGGCTGCTCGCCTTCCAGCTCAATCCTGCCGGT |
| | TGCGCCTTCTTCCTGCACATGACCAACTGGAACCTACAAGCAGCAATTGGCGCCTATT |
| | ATGACTTTGAGAOCCCAAACATCAGTGTGCCCTCTATGTCCTTTGTTGAAGATGTCAC |
| | CATAGGAGAAGCGGAGTCAATACCTCCGGATACTCAGTTTGTAAAAACATGGCGGATC |
| | CAGAATTCTGGGGCAGAGGCCTGGCCTCCAGGGGTTTGTCTTAAATATGTCGGGGGAG |
| | ACCAATTTGGACATGTGAACATGGTGATGGTGAGATCGCTAGAGCCCCAAGAGATTGC |
| | AGATGTCAGCGTCCAGATGTGCAGCCCCAGCAGAGCAGGAATGTATCAGGGACAGTGG |
| | CGGATGTGCACTGCTACAGGACTCTACTATGGAGATGTCATCTGGGTGATTCTCAGTG |
| | TGGAGCTGGGTGGACTTTTAGGAGTAACGCAGCAGCTGTCATCTTTTGAAACGGAGTT |
| | CAACACACAGCCGCATCGTAAGCTAGAAGGAAACTTCAACCCTTTTGCCTCTCCCCAA |
| | AACAACCGACAATCAGATGAAAACAACTTAAAAGACCCTGGGGGCTCCGAGTTCGACT |
| | CGATCAGCAAAAACACATGGGCTCCTGCTCCTGACACATGGGCTCCTGCTCCTGACCA |
| | AACTGAGCAAGACCAGAATAGACTGTCACAGAACTCTGTAAATCTGTCTCCCAGCAGT |
| | CACGCAAACAACTTATCAGTAGTGACTTACAGTAAGGGGCTCCATGGGCCTTACCCCT |
| | TCGGCCAGTCTTAAACGGGTGTCAGCAAAAAAAAAAAAAAAAAA |

| | |
|---|---|
| ORF Start: ATG at 162 | Stop: TAA at 1056 |

| | | |
|---|---|---|
| SEQ ID NO: 141 | 298 aa | MW at 32871.4 kD |

| | |
|---|---|
| NOV4a, | MEGMDVDLDPELMQKFSCLGTTDKDVLISEFQRLLGFQLNPAGCAFFLDMTNWNLQAA |
| CG151608-01 | |
| Protein Sequence | IGAYYDFESPNISVPSMSFVEDVTIGEGESIPPDTQFVKTWRIQNSGAEAWPPGVCLK |
| | YVGGDQFGHVNMVMVRSLEPQEIADVSVQMCSPSRAGMYQGQWRMCTATGLYYGDVIW |
| | VILSVEVGGLLGVTQQLSSFETEFNTQPHRKVEGNFNPFASPQKNRQSDENNLKDPGG |
| | SEFDSISKNTWAPAPDTWAPAPDQTEQDQNRLSQNSVNLSPSSHANNLSVVTYSKGLH |
| | CPYPFGQS |

| | |
|---|---|
| SEQ ID NO: 15 | 735 bp |

| | |
|---|---|
| NOV4b, | AGGCGGGGAAGCGGGTGTCCGGTCCCCGCCATGGAGGGCATGGACGTAGACCTGGACC |
| CG151608-02 DNA | |
| Sequence | CGGAGCTGATGCAGAAGTTCAGCTGCCTGGGCACCACCGACAAGGACGTGCTCATCTC |
| | CGAGTTCCAGAGGCTGCTCCOCTTCCAGCTCAATCCTGCCGGTTGCGCCTTCTTCCTG |
| | GACATGACCAACTGGAACCTACAAGCAGCAATTGGCGCCTATTATGACTTTGAGAGCC |
| | CAAACATCAGTGTGCCCTCTATGTCCTTTGTTGAAGATGTCACCATAGGAGAAGGGGA |
| | GTCAATACCTCCGGATACTCAGTTTGTAAAAACATGGCGGATCCAGAATTCTGATGTC |
| | ATCTGGGTGATTCTCAGTGTGGAGGTGGGTGCACTTTTAGGAGTAACGCAGCAGCTGT |
| | CATCTTTTGAAACOGAGTTCAACACACAGCCGCATCGTAAGGTAGAAGGAAACTTCAA |
| | CCCTTTTGCCTCTCCCCAAAAGAACCGACAATCAGATGAAAACAACTTAAAAGACCCT |
| | GGGGGCTCCGAGTTCGACTCGATCAGCAAAAACACATGGGCTCCTGCTCCTGACACAT |
| | GGGCTCCTGCTCCTGACCAAACTGAGCAAGACCAGAATAGACTGTCACAGAACTCTGT |
| | AAATCTGTCTCCCAGCAGTCACGCAAACAACTTATCAGTAGTGACTTACAGTAAGGGG |
| | CTCCATGGGCCTTACCCCTTCGGCCAGTCTTAAACGGGT |

| | |
|---|---|
| ORF Start: ATG at 31 | ORF Stop: TAA at 727 |

| | | |
|---|---|---|
| SEQ ID NO: 16 | 232 aa | MW at 25G73.1 kD |

| | |
|---|---|
| NOV4b, | MEGMDVDLDPELMQKFSCLGTTDKDVLISEFQRLLGFQLNPAGCAFFLDMTNWNLQAA |
| CG151608-02 | |
| Protein Sequence | IGAYYDFESPNISVPSMSFVEDVTIGEGESIPPDTQFVKTWRIQNSDVIWVILSVEVG |
| | GLLGVTQQLSSFETEFNTQPHRKVEGNFNPFASPQKNRQSDENNLKDPGGSEFDSISK |
| | NTWAPAPDTWAPAPDQTEQDQNRLSQNSVNLSPSSHANNLSVVTYSKGLHGPYPFGQS |

[0384] Sequence comparison of the above protein sequences yields the following sequence relationships shown in Table 4B.

TABLE 4B
Comparison of NOV4a against NOV4b.

| | | Identities/ |
|---|---|---|
| Protein | NOV4a Residues/ | Similarities for |
| Sequence | Match Residues | the Matched Region |
| NOV4b | 171 . . . 298 | 128/128 (100%) |
| | 105 . . . 232 | 128/128 (100%) |

[0385] Further analysis of the NOV4a protein yielded the following properties shown in Table 4C.

TABLE 4C
Protein Sequence Properties NOV4a

| | |
|---|---|
| PSort | 0.7000 probability located in plasma membrane; |
| analysis: | 0.3389 probability located in microbody |
| | (peroxisome); 0.2000 probability located in |
| | endoplasmic reticulum (membrane); 0.1000 |
| | probability located in mitochondrial inner membrane |
| SignalP | No Known Signal Sequence Predicted |
| analysis: | |

[0386] A search of the NOV4a protein against the Geneseq database, a proprietary database that contains sequences published in patents and patent publication, yielded several homologous proteins shown in Table 4D.

TABLE 4D
Geneseq Results for NOV4a

| | | NOV4a | Identities/ | |
|---|---|---|---|---|
| | | Residues/ | Similarities | |
| Geneseq | Protein/Organism/Length | Match | for the Matched | Expect |
| Identifier | [Patent #, Date] | Residues | Region | Value |
| ABG40261 | Human peptide encoded by | 172 . . . 287 | 116/116 (100%) | 2e−63 |
| | genome-derived single exon | 1 . . . 116 | 116/116 (100%) | |
| | probe SEQ ID 29926 - Homo | | | |
| | sapiens, 116 aa. | | | |
| | [WO200186003-A2, 15 NOV. | | | |
| | 2001] | | | |
| AAM18432 | Peptide #4866 encoded by | 172 . . . 287 | 116/116 (100%) | 2e−63 |
| | probe for measuring cervical | 1 . . . 116 | 116/116 (100%) | |
| | gene expression - Homo | | | |
| | sapiens, 116 aa. | | | |
| | [WO200157278-A2, 09 AUG. | | | |
| | 2001] | | | |
| AAM58143 | Human brain expressed single | 172 . . . 287 | 116/116 (100%) | 2e−63 |
| | exon probe encoded protein | 1 . . . 116 | 116/116 (100%) | |
| | SEQ ID NO: 30248 - Homo | | | |
| | sapiens, 116 aa. | | | |
| | [WO200157275-A2, 09 AUG. | | | |
| | 2001] | | | |
| ABB22766 | Protein #4765 encoded by | 172 . . . 287 | 116/116 (100%) | 2e−63 |
| | probe for measuring heart | 1 . . . 116 | 116/116 (100%) | |
| | cell gene expression - Homo | | | |
| | sapiens, 116 aa. | | | |
| | [WO200157274-A2, 09 AUG. | | | |
| | 2001] | | | |
| ABG15581 | Novel human diagnostic | 1 . . . 83 | 83/83 (100%) | 7e−43 |
| | protein #15572 - Homo | 44 . . . 126 | 83/83 (100%) | |
| | sapiens, 139 aa. | | | |
| | [WO200175067-A2, 11 OCT. | | | |
| | 2001] | | | |

[0387] In a BLAST search of public sequence datbases, the NOV4a protein was found to have homology to the proteins shown in the BLASTP data in Table 4E.

TABLE 4E
Public BLASTP Results for NOV4a

| | | NOV4a | Identities/ | |
|---|---|---|---|---|
| Protein | | Residues/ | Similarities | |
| Accession | | Match | for the Matched | Expect |
| Number | Protein/Organism/Length | Residues | Portion | Value |
| Q9BUR9 | Hypothetical 32.9 kDa | 1 . . . 298 | 298/298 (100%) | e−179 |
| | protein - Homo sapiens | 1 . . . 298 | 298/298 (100%) | |
| | (Human), 298 aa. | | | |
| Q96MG5 | CDNA FLJ32402 fis, clone | 171 . . . 298 | 128/128 (100%) | 2e−71 |
| | SKMUS2000343 - Homo sapiens | 105 . . . 232 | 128/128 (100%) | |
| | (Human), 232 aa. | | | |
| Q9VX56 | CG5445 protein (LD03052p) - | 5 . . . 176 | 65/172 (37%) | 8e−25 |
| | Drosophila melanogaster | 111 . . . 263 | 94/172 (53%) | |
| | (Fruit fly), 303 aa. | | | |
| Q9BL99 | Hypothetical 28.4 kDa | 8 . . . 179 | 52/184 (28%) | 2e−16 |
| | protein - Caenorhabditis | 4 . . . 186 | 92/184 (49%) | |
| | elegans, 245 aa. | | | |
| Q9SB64 | Hypothetical 76.2 kDa | 77 . . . 180 | 38/110 (34%) | 8e−13 |
| | protein - Arabidopsis | 380 . . . 487 | 58/110 (52%) | |
| | thaliana (Mouse-ear cress), | | | |
| | 704 aa. | | | |

[0388] PFam analysis predicts that the NOV4a protein contains the domains shown in the Table 4F.

TABLE 4F
Domain Analysis of NOV4a

| | | | |
|---|---|---|---|
| | | Identities/ | |
| | NOV4a Match | Similarities for | |
| Pfam Domain | Region | the Matched Region | Expect Value |

No Significant Matches Found

### Example 5

[0389] The NOV5 clone was analyzed, and the nucleotide and encoded polypeptide sequences are shown in Table 5A.

TABLE 5A
NOV5 Sequence Analysis

| | |
|---|---|
| SEQ ID NO: 17 | 3544 bp |

| | |
|---|---|
| NOV5a, | ACATGCCCCGTTTGCTGCCTGAACCTCTCCACAAAGACTCCCAGATCCTGAATTGAAT |
| CG152323-01 DNA | |
| Sequence | TTAATCATCTCCTGACAAAAGAATGCAATTTCAACTGACCCTTTTTTTGCACCTTGGG |
| | TGGCTCAGTTACTCAAAAGCTCAAGATGACTGCAACAGGGGTGCCTGTCATCCCACCA |
| | CTGGTGATCTCCTGGTGGGCAGGAACACGCAGCTTATGGCTTCTTCTACCTGTGGGCT |
| | GAGCAGAGCCCAGAAATACTGCATCCTCAGTTACCTGGAGGGGGAACAAAAATGCTCC |
| | ATCTGTGACTCTAGATTTCCATATGATCCGTATGACCAACCCAACAGCCACACCATTG |
| | AGAATGTCACTGTAAGTTTTGAACCAGACAGAGAAAAGAAATGGTGGCAATCTGAAAA |
| | TGGTCTTGATCATGTCACCATCAGACTGGACTTAGAGGCATTATTTCGGTTCAGCCAC |
| | CTTATCCTGACCTTTAAGACTTTTCGGCCTGCTGCAATGTTAGTTGAACGTTCCACAG |
| | ACTATGGACACAACTGGAAAGTGTTCAAATATTTTGCAAAAGACTGTGCCACTTCCTT |
| | TCCTAACATCACATCTGCCCAGGCCCAGGGAGTGGGAGACATTGTTTGTGACTCCAAA |
| | TACTCCGATATTGAACCCTCAACAGGTGGAGAGGTTGTTTTAAAAGTTTTGGATCCCA |
| | GTTTTGAAATTGAAAACCCTTATAGCCCCTACATCCAAGACCTTGTGACATTGACAAA |
| | CCTGAGGATAAACTTTACCAAGCTCCACACCCTTGGGGATGCTTTGCTTGGAAGCAGG |
| | CAAAATGATTCCCTTOATAAATACTACTATGCTCTGTACGAGATGATTGTTCGGGGAA |
| | GCTGCTTTTGCAATGGCCATGCTAGCGAATGTCGCCCTATGCAGAAGATGCCGGGAGA |
| | TGTTTTCAGCCCTCCTGGAATGGTTCACGGTCAGTGTGTGTGTCAGCACAATACAGAT |
| | GGTCCGAACTGTGAGAGATGCAAGGACTTCTTCCAGGATGCTCCTTGGAGGCCAGCTG |
| | CAGACCTCCAGGACAACGCTTGCAGATCGTGCAGCTGTAATAGCCACTCCAGCCGCTG |
| | TCACTTTGACATGACTACGTACCTGGCAACCGGTGGCCTCAGCGGGGGCGTGTGTGAA |
| | GACTGCCAGCACAACACTGAGGGGCAGCACTGCGACCGCTGCAGACCCCTCTTCTACA |
| | GGGACCCGCTCAAGACCATCTCAGATCCCTACGCGTGCATTCCTTGTGAATGTGACCC |
| | CGATGGGACCATATCTGGTGGCATTTGTGTGAGCCACTCTGATCCTGCCTTAGGGTCT |
| | GTGGCCGGCCAGTGCCTTTGTAAAGAGAACGTGGAAGGAGCCAAATGCGACCAGTGCA |
| | AACCCAACCACTACGGACTAAGCGCCACCGACCCCCTGGGCTGCCAGCCCTGCGACTG |
| | TAACCCCCTTGGGAGTCTGCCATTCTTGACCTGTGATGTGGATACAGGCCAATGCTTG |
| | TGCCTGTCATATGTCACCGGACCACACTGCGAAGAATGCACTGTTGGATACTGGGGCC |
| | TGGGAAATCATCTCCATGGGTGTTCTCCCTGTGACTGTGATATTGGAGGTGCTTATTC |
| | TAACGTGTGCTCACCCAACAATGGGCAGTGTGAATGCCGCCCACATGTCACTGGCCGT |
| | AGCTGCTCTGAACCAGCCCCTGGCTACTTCTTTGCTCCTTTGAATTTCTATCTCTACG |
| | AGGCAGAGGAAGCCACAACACTCCAAGGACTGGCGCCTTTGGGCTCGGAGACGTTTGG |
| | CCAGAGTCCTGCTGTTCACGTTGTTTTAGGAGAGCCAGTTCCTGGGAACCCTGTTACA |
| | TGGACTGGACCTGGATTTGCCAGGGTTCTCCCTGGGGCTGGCTTGAGATTTGCTGTCA |
| | ACAACATTCCCTTTCCTGTGGACTTCACCATTGCCATTCACTATGAAACCCAGTCTGC |
| | AGCTGACTGGACTGTCCAGATTGTGGTGAACCCCCCTGGAGGGAGTGAGCACTGCATA |
| | CCCAAGACTCTACAGTCAAAGCCTCAGTCTTTTGCCTTACCAGCGGCTACGAGAATCA |
| | TGCTGCTTCCCACACCCATCTGTTTAGAACCAGATGTACAATATTCCATAGATGTCTA |
| | TTTTTCTCAGCCTTTGCAAGGAGAGTCCCACGCTCATTCACATGTCCTGGTGGACTCT |
| | CTTGGCCTTATTCCCCAAATCAATTCATTGGAGAATTTCTGCAGCAAGCAGGACTTAG |
| | ATGAGTATCAGCTTCACAACTGTGTTGAAATTGCCTCAGCAATGGGACCTCAAGTGCT |
| | CCCGGGTGCCTGTGAAAGGCTGATCATCAGCATGTCTGCCAAGCTGCATGATGGGGCT |
| | GTGGCCTGCAAGTGTCACCCCCAGGGCTCAGTCGGATCCAGCTGCAGCCGACTTGGAG |
| | GCCAGTGCCAGTGTAAACCTCTTGTGGTCGGGCGCTGCTGTGACAGGTGCTCAACTGG |
| | AAGCTATGATTTGGGGCATCACGGCTGTCACCCATGTCACTGCCATCCTCAAGGATCA |
| | AAGGACACTGTATGTGACCAAGTAACAGGACAGTGCCCCTGCCATGGAGAGGTGTCTG |
| | GCCGCCGCTGTGATCGCTGCCTGGCAGGCTACTTTGGATTTCCCAGCTGCCACCCTTG |
| | CCCTTGTAATAGGTTTGCTGAACTTTGTGATCCTGAGACAGGGTCATGCTTCAATTGT |
| | GGAGGCTTTACAACTGGCAGAAACTGTGAAAGGTGTATTGATGGTTACTATGGAAATC |
| | CTTCTTCAGGACAGCCCTGTCGTCCTTGCCTGTGTCCAGATGATCCCTCAACCAATCA |
| | GTATTTTGCCCATTCCTGTTATCAGAATCTGTGGAGCTCAGATGTAATCTGCAATTGT |
| | CTTCAAGGTTATACGGGTACTCAGTGTGGAGAATGCTCTACTGGTTTCTATGGAAATC |
| | CAAGAATTTCAGGAGCACCTTGCCAACCATGTGCCTGCAACAACAACATAGATGTAAC |
| | CGATCCAGAGTCCTGCAGCCGGGTAACAGGGGAGTCCCTTCGATGTTTGCACAACACT |
| | CAGGGCGCAAACTGCCAGCTCTGCAAACCAGGTCACTATGGATCAGCCCTCAATCAGA |
| | CCTGCAGAAGATGCTCCTGCCATGCTTCCGGCGTGAGTCCCATGGAGTGTCCCCCTGG |
| | TGGGGGAGCTTGCCTCTGTGACCCTGTCACTGGTGCATGTCCTTGTCTGCCGAATGTC |
| | ACAGGCCTGGCCTGTGACCGTTGTGCTGATGGATACTGGAATCTGGTCCCTGGCAGAG |
| | GATGTCAGTCATGTGACTGTGACCCTAGGACCTCTCAAAGTAGCCACTGTGACCAGGC |
| | AAGATACTTTAAAGCTTACTAGTGCACTCAAAGTGAGCATGATAGTGAGACATGGTTT |
| | CTAAATGTGTAAAGAAAGTTTCTTTTATGTACTGTTGTTAATTAGTGCATTGAAACAG |
| | GGGTGGCCTTACAGGGGATGGAGTCAGCCTCTATCAAGGAATGAAAACCAAAAAAAGA |
| | GAATGA |

| | |
|---|---|
| ORF Start: ATG at 81 | ORF Stop: TAG at 3384 |

| | | |
|---|---|---|
| SEQ ID NO: 18 | 1101 aa | MW at 119568.2 kD |

| | |
|---|---|
| NOV5a, | MQFQLTLFLHLGWLSYSKAQDDCNRGACHPTTGDLLVGRNTQLMASSTCGLSRAQKYC |
| CG152323-01 | |
| Protein Sequence | ILSYLEGEQKCSICDSRFPYDPYDQPNSHTIENVTVSFEPDREKKWWQSENGLDHVSI |
| | RLDLEALFRFSHLILTFKTFRPAANLVERSTDYGHNWKVFKYFAKDCATSFPNITSGQ |
| | AQGVGDIVCDSKYSDIEPSTGGEVVLKVLDPSFEIENPYSPYIQDLVTLTNLRINFTK |
| | LHTLGDALLGRRQNDSLDKYYYALYEMIVRGSCFCNGHASECRPMQKMRGDVFSPPGM |
| | VHGQCVCQHNTDGPNCERCKDFFQDAPWRPAADLQDNACRSCSCNSHSSRCHFDMTTY |
| | LASGGLSGGVCEDCQHNTEGQHCDRCRPLFYRDPLKTISDPYACIPCECDPDGTISGG |
| | ICVSHSDPALGSVAGQCLCKENVEGAKCDQCKPNHYGLSATDPLGCQPCDCNPLGSLP |
| | FLTCDVDTGQCLCLSYVTGAHCEECTVGYWGLGNHLHGCSPCDCDIGGAYSNVCSPKN |
| | GQCECRPHVTGRSCSEPAPGYFFAPLNFYLYEAEEATTLQGLAPLGSETFGQSPAVHV |
| | VLGEPVPGNPVTWTGPGFARVLPGAGLRFAVNNIPFPVDFTIAIHYETQSAADWTVQI |
| | VVNPPGGSEHCIPKTLQSKPQSFALPAATRIMLLPTPICLEPDVQYSIDVYFSQPLQG |
| | ESHAHSHVLVDSLGLIPQINSLENFCSKQDLDEYQLHNCVEIASAMGPQVLPGACERL |
| | IISMSAKLHDGAVACKCHPQGSVGSSCSRLGGQCQCKPLVVGRCCDRCSTGSYDLGHH |
| | GCHPCHCHPQGSKDTVCDQVTGQCPCHGEVSGRRCDRCLAGYFGFPSCHPCPCNRFAE |
| | LCDPETGSCFNCGGFTTGRNCERCIDGYYGNPSSGQPCRPCLCPDDPSSNQYFAHSCY |
| | QNLWSSDVICNCLQGYTGTQCGECSTGFYGNPRISGAPCQPCACNNNIDVTDPESCSR |
| | VTGECLRCLHNTQGANCQLCKPGHYGSALNQTCRRCSCHASGVSPMECPPGGGACLCD |
| | PVTGACPCLPNVTGLACDRCADGYWNLVPGRGCQSCDCDPRTSQSSHCDQARYFKAY |

[0390] Further analysis of the NOV5a protein yielded the following properties shown in Table 5B.

TABLE 5B
Protein Sequence Properties NOV5a

| | |
|---|---|
| PSort | 0.4500 probability located in cytoplasm; |
| analysis: | 0.3000 probability located in microbody |
| | (peroxisome); 0.1000 probability located in |
| | mitochondrial matrix space; 0.1000 probability |
| | located in lysosome (lumen) |
| SignalP | Cleavage site between residues 20 and 21 |
| analysis: | |

[0391] A search of the NOV5a protein against the Geneseq database, a proprietary database that contains sequences published in patents and patent publication, yielded several homologous proteins shown in Table 5C.

TABLE 5C
Geneseq Results for NOV5a

| | | NOV5a | Identities/ | |
|---|---|---|---|---|
| | | Residues/ | Similarities for | |
| Geneseq | Protein/Organism/Length | Match | the Matched | Expect |
| Identifier | [Patent #, Date] | Residues | Region | Value |
| AAY15457 | Human laminin beta 4 | 1 . . . 1094 | 1094/1094 (100%) | 0.0 |
| | protein - Homo sapiens, | 1 . . . 1094 | 1094/1094 (100%) | |
| | 1761 aa. [WO9919348-A1, 22 | | | |
| | APR. 1999] | | | |
| AAY15459 | SEQ ID 5 of WO9919347 - | 1 . . . 1101 | 1094/1105 (99%) | 0.0 |
| | Homo sapiens, 1105 aa. | 1 . . . 1105 | 1094/1105 (99%) | |
| | [WO9919348-A1, 22 APR. 1999] | | | |
| AAM48896 | Laminin protein - | 23 . . . 1094 | 539/1089 (49%) | 0.0 |
| | Unidentified, 1786 aa. | 30 . . . 1098 | 707/1089 (64%) | |
| | [WO200193897-A2, 13 DEC. | | | |
| | 2001] | | | |
| ABB81591 | Human laminin 10 second | 23 . . . 1094 | 539/1089 (49%) | 0.0 |
| | chain protein sequence SEQ | 9 . . . 1077 | 707/1089 (64%) | |
| | ID NO: 8 - Homo sapiens, | | | |
| | 1765 aa. [WO200250111-A2, | | | |
| | 27 JUN. 2002] | | | |
| ABB81590 | Human laminin 10 second | 23 . . . 1094 | 539/1089 (49%) | 0.0 |
| | chain protein sequence SEQ | 30 . . . 1098 | 707/1089 (64%) | |
| | ID NO: 6 - Homo sapiens, | | | |
| | 1786 aa. [WO200250111-A2, | | | |
| | 27 JUN. 2002] | | | |

[0392] In a BLAST search of public sequence datbases, the NOV5a protein was found to have homology to the proteins shown in the BLASTP data in Table 5D.

TABLE 5D
Public BLASTP Results for NOV5a

| | | NOV5a | Identities/ | |
|---|---|---|---|---|
| Protein | | Residues/ | Similarities for | |
| Accession | | Match | the Matched | Expect |
| Number | Protein/Organism/Length | Residues | Portion | Value |
| Q9Y6U6 | WUGSC:H_RG015P03.1 protein - | 23 . . . 1093 | 1059/1071 (98%) | 0.0 |
| | Homo sapiens (Human), | 1 . . . 1069 | 1061/1071 (98%) | |
| | 1631 aa (fragment). | | | |
| Q9UHI2 | Laminin beta 1 related | 13 . . . 767 | 746/760 (98%) | 0.0 |
| | protein - Homo sapiens | 1 . . . 760 | 747/760 (98%) | |
| | (Human), 761 aa (fragment). | | | |
| O57484 | Laminin beta 2-like chain - | 23 . . . 1094 | 542/1084 (50%) | 0.0 |
| | Gallus gallus (Chicken), | 42 . . . 1103 | 712/1084 (65%) | |
| | 1792 aa. | | | |
| AAM61767 | Laminin beta 1 - | 21 . . . 1094 | 537/1092 (49%) | 0.0 |
| | Brachydanio rerio | 24 . . . 1095 | 712/1092 (65%) | |
| | (Zebrafish) (Danio rerio), | | | |
| | 1785 aa. | | | |
| CAC17320 | Sequence 15 from Patent | 23 . . . 1094 | 539/1089 (49%) | 0.0 |
| | WO0066730 - Homo sapiens | 9 . . . 1077 | 707/1089 (64%) | |
| | (Human), 1765 aa | | | |
| | (fragment). | | | |

[0393] PFam analysis predicts that the NOV5a protein contains the domains shown in the Table 5E.

TABLE 5E
Domain Analysis of NOV5a

| | | Identities/ | |
|---|---|---|---|
| | NOV5a Match | Similarities for | |
| Pfam Domain | Region | the Matched Region | Expect Value |
| laminin_Nterm | 28 . . . 263 | 114/266 (43%) | 6.8e−104 |
| | | 181/266 (68%) | |
| laminin_EGF | 265 . . . 329 | 18/71 (25%) | 1.5e−09 |
| | | 48/71 (68%) | |
| laminin_EGF | 332 . . . 392 | 20/65 (31%) | 4.8e−18 |
| | | 48/65 (74%) | |
| laminin_EGF | 395 . . . 452 | 27/60 (45%) | 4.5e−19 |
| | | 45/60 (75%) | |
| laminin_EGF | 455 . . . 503 | 28/59 (47%) | 1.7e−14 |
| | | 39/59 (66%) | |
| laminin_EGF | 506 . . . 548 | 20/59 (34%) | 0.00014 |
| | | 30/59 (51%) | |
| laminin_EGF | 769 . . . 814 | 24/59 (41%) | 4.5e−11 |
| | | 36/59 (61%) | |
| laminin_EGF | 817 . . . 860 | 23/59 (39%) | 8e−14 |
| | | 37/59 (63%) | |
| laminin_EGF | 863 . . . 908 | 25/59 (42%) | 6.4e−09 |
| | | 35/59 (59%) | |
| laminin_EGF | 911 . . . 967 | 16/62 (26%) | 0.00078 |
| | | 36/62 (58%) | |
| laminin_EGF | 970 . . . 1019 | 21/60 (35%) | 1.4e−14 |
| | | 38/60 (63%) | |
| laminin_EGF | 1022 . . . 1077 | 24/61 (39%) | 2.5e−12 |
| | | 41/61 (67%) | |

### Example 6

[0394] The NOV6 clone was analyzed, and the nucleotide and encoded polypeptide sequences are shown in Table 6A.

TABLE 6A
NOV6 Sequence Analysis

| | |
|---|---|
| SEQ ID NO: 19 | 2265 bp |

| | |
|---|---|
| NOV6a, | ACTTCCAGGTGGGAGTGCGTGGGCGGGGGAGCTGGAGCCGAGCGCCGCCGCCGAAGCT |
| CG153011-01 DNA | |
| Sequence | TCCGTCTCGCTCGCTCGCGCAGCGGCGGCAGCAGAGGTCGCGCACAGATGCGGGTTAG |
| | ACTGGCGGGGGGAGGAGGCGGAGGAGGGAAGGAAGCTGCATGCATGAGACCCACAGCG |
| | CAGAGAAATCTCACTGGGGACTGGGGCAGTAGGATCGATCCCAATCCCGAGGAAAACC |
| | AGAGAAGTAGCTGGGGGAGACGGTGCCACATTACTCTTGCAAGCTGGATGCCCTCTGT |
| | GGATGAAAGATGTATCATGGAATGAACCCGAGCAATGGAGATGGATTTCTAGAGCAGC |
| | AGCAGCAGCAGCAGCAACCTCAGTCCCCCCAGAGACTCTTGGCCGTGATCCTGTGGTT |
| | TCAGCTGGCGCTGTGCTTCGGCCCTGCACAGCTCACGGGCGCACCGGGGTGGCCTCAA |
| | GAAACTCACAATCATGGCAGAAGGGAAAGCAAACGCATCCTTCTTCACATGGCGGCAG |
| | CAAGGAGAAGTGCAGAGAGAGAAGAAAGTCCCTTATAAAACCATCAGACCTCATGAGA |
| | ACTCATTCACTATCACAAGAACAGCATGGAGGGTTCGATGACCTTCAAGTGTGTGCTG |
| | ACCCCGGCATTCCCGAGAATGGCTTCAGGACCCCCAGCGGAGGGGTTTTCTTTGAAGG |
| | CTCTGTAGCCCGATTTCACTGCCAAGACGGATTCAAGCTGAAGCGCGCTACAAAGAGA |
| | CTGTGTTTGAAGCATTTTAATGGAACCCTAGGCTGGATCCCAAGTGATAATTCCATCT |
| | GTGTGCAAGAAGATTGCCGTATCCCTCAAATCGAAGATGCTGAGATTCATAACAAGAC |
| | ATATAGACATGGAGAGAAGCTAATCATCACTTGTCATGAAGGATTCAAGATCCGGTAC |
| | CCCGACCTACACAATATGGTTTCATTATGTCGCGATGATGGAACGTGGAATAATCTGC |
| | CCATCTGTCAAGGCTGCCTCAGACCTCTAGCCTCTTCTAATGGCTATGTAAACATCTC |
| | TGAGCTCCAGACCTCCTTCCCGGTGGGGACTGTGATCTCCTATCGCTGCTTTCCCGGA |
| | TTTAAACTTGATGGGTCTCCGTATCTTGAGTGCTTACAAAACCTTATCTCGTCGTCCA |
| | GCCCACCCCGGTGCCTTGCTCTGGAAGCCCAAGTCTGTCCACTACCTCCAATGGTGAG |
| | TCACGGACATTTCGTCTCCCACCCGCGGCCTTGTGAGCGCTACAACCACGGAACTGTG |
| | GTGGAGTTTTACTGCGATCCTGGCTACAGCCTCACCAGCGACTACAAGTACATCACCT |
| | GCCAGTATGGAGAGTGGTTTCCTTCTTATCAAGTCTACTGCATCAAATCAGAGCAAAC |
| | GTGGCCCAGCACCCATGAGACCCTCCTGACCACGTGGAAGATTGTGGCGTTCACGGCA |
| | ACCAGTGTGCTGCTGGTGCTGCTGCTCGTCATCCTGGCCAGGATGTTCCAGACCAAGT |
| | TCAAGGCCCACTTTCCCCCCAOGGGGCCTCCCCGGAGTTCCAGCAGTGACCCTGACTT |
| | TGTGGTGGTAGACGGCGTGCCCGTCATGCTCCCGTCCTATGACGAAGCTGTGAGTGGC |
| | GGCTTGAGTGCCTTAGGCCCCGGGTACATGGCCTCTGTGGGCCAGGGCTGCCCCTTAC |
| | CCGTGGACGACCAGAGCCCCCCAGCATACCCCGGCTCAGGGGACACGGACACAGGCCC |
| | AGGGGAGTCAGAAACCTGTGACAGCGTCTCAGGCTCTTCTGAGCTGCTCCAAAGTCTG |
| | TATTCACCTCCCAGGTGCCAAGAGAGCACCCACCCTACTTCGGACAACCCTGACATAA |
| | TTGCCAGCACGGCAGAGGACGTGGCATCCACCAGCCCAGGCATCGACATTGCAGATGA |
| | GATTCCTCTAATGGAAGAAGATCCCTAATATGGGTCAAGATCCAGATGACTCTCCTGC |
| | TCCTTCGGGGAAAGGACCTTGTATCTTGGAGTGAGGTCACAGAAGGATAGAGCCTGGG |
| | GGCAAAATGTCTAACTTGTCTACATGGGGACCACAGTTCACATTATGCATCTCAGGCT |
| | CCACAGTGAGGCTGACAAACTGCAATGGCAGTGCTTTTAAATGAGATTTGAGGATTCA |
| | CCAAGACCCATGGGGAACCGGGOCAGCAGGGAAGCCCTCGCGTGGTCTTGGATGAGGG |
| | GTGTTAAATGTGTATCGTGCTGTGGAACATGGGACAATTCCACGCACTCCCACCTGGA |
| | AGT |

| | |
|---|---|
| ORF Start: ATG at 293 | ORF Stop: TAA at 1940 |

| | | |
|---|---|---|
| SEQ ID NO: 20 | 549 aa | MW at 60114.0 kD |

| | |
|---|---|
| NOV6a | MKDVSWNEPEQWRWISRAAAAAAATSVPPETLGRDPVVSAGAVLRPCTAHGRTGVASR |
| CG153011-01 | |
| Protein Sequence | NSQSWQKGKQTHPSSHGGSKEKCRERRKSLIKPSDLMRTHSLSQEQHGGFDDLQVCAD |
| | PGIPENGFRTPSGGVFFEGSVARFHCQDGFKLKGATKRLCLKHFNGTLGWIPSDNSIC |
| | VQEDCRIPQIEDAEIHNKTYRHGEKLIITCHEGFKIRYPDLHNMVSLCRDDGTWNNLP |
| | ICQGCLRPLASSNGYVNISELQTSFPVGTVISYRCFPGFKLDGSAYLECLQNLIWSSS |
| | PPRCLALEAQVCPLPPMVSHGDFVCHPRPCERYNHGTVVEFYCDPGYSLTSDYKYITC |
| | QYGEWFPSYQVYCIKSEQTWPSTHETLLTTWKIVAFTATSVLLVLLLVILARMFQTKF |
| | KAHFPPRGPPRSSSSDPDFVVVDGVPVMLPSYDEAVSGGLSALGPGYMASVGQGCPLP |
| | VDDQSPPAYPGSGDTDTGPGESETCDSVSGSSELLQSLYSPPRCQESTHPTSDNPDII |
| | ASTAEEVASTSPGIDIADEIPLMEEDP |

[0395] Further analysis of the NOV6a protein yielded the following properties shown in Table 6B.

TABLE 6B
Protein Sequence Properties NOV6a

| | |
|---|---|
| PSort | 0.8000 probability located in mitochondrial |
| analysis: | inner membrane; 0.7000 probability located in |
| | plasma membrane; 0.2000 probability located in |
| | endoplasmic reticulum (membrane); 0.0646 |
| | probability located in microbody (peroxisome) |
| SignalP | No Known Signal Sequence Predicted |
| analysis: | |

[0396] A search of the NOV6a protein against the Geneseq database, a proprietary database that contains sequences published in patents and patent publication, yielded several homologous proteins shown in Table 6C.

TABLE 6C
Geneseq Results for NOV6a

| | | NOV6a | Identities/ | |
|---|---|---|---|---|
| | | Residues/ | Similarities | |
| Geneseq | Protein/Organism/Length | Match | for the Matched | Expect |
| Identifier | [Patent #, Date] | Residues | Region | Value |
| AAB80234 | Human PRO222 protein - | 106 . . . 536 | 430/431 (99%) | 0.0 |
| | Homo sapiens, 490 aa. | 49 . . . 479 | 430/431 (99%) | |
| | [WO200104311-A1, | | | |
| | 18 JAN. 2001] | | | |
| AAU12326 | Human PRO222 | 106 . . . 536 | 430/431 (99%) | 0.0 |
| | polypeptide sequence - | 49 . . . 479 | 430/431 (99%) | |
| | Homo sapiens, 490 aa. | | | |
| | [WO200140466-A2, | | | |
| | 07 JUN. 2001] | | | |
| AAY13366 | Amino acid sequence | 106 . . . 536 | 430/431 (99%) | 0.0 |
| | of protein PRO222 - | 49 . . . 479 | 430/431 (99%) | |
| | Homo sapiens, 490 aa. | | | |
| | [WO9914328-A2, | | | |
| | 25 MAR. 1999] | | | |
| ABG26615 | Novel human diagnostic | 237 . . . 540 | 299/353 (84%) | e−175 |
| | protein #26606 - | 1 . . . 353 | 300/353 (84%) | |
| | Homo sapiens, 463 aa. | | | |
| | [WO200175067-A2, | | | |
| | 11 OCT. 2001] | | | |
| ABB55790 | Human polypeptide | 106 . . . 298 | 193/193 (100%) | e−117 |
| | SEQ ID NO 186 - | 49 . . . 241 | 193/193 (100%) | |
| | Homo sapiens, 290 aa. | | | |
| | [US2001039335-A1, | | | |
| | 08 NOV. 2001] | | | |

[0397] In a BLAST search of public sequence datbases, the NOV6a protein was found to have homology to the proteins shown in the BLASTP data in Table 6D.

TABLE 6D
Public BLASTP Results for NOV6a

| | | NOV6a | Identities/ | |
|---|---|---|---|---|
| Protein | | Residues/ | Similarities | |
| Accession | | Match | for the | Expect |
| Number | Protein/Organism/Length | Residues | Matched Portion | Value |
| Q95K70 | Hypothetical 43.3 | 157 . . . 549 | 376/393 (95%) | 0.0 |
| | kDa protein - Macaca | 1 . . . 393 | 384/393 (97%) | |
| | fascicularis | | | |
| | (Crab eating macaque) | | | |
| | (Cynomolgus | | | |
| | monkey), 393 aa. | | | |
| Q8VC43 | Hypothetical 43.1 kDa | 157 . . . 549 | 356/393 (90%) | 0.0 |
| | protein - Mus musculus | 1 . . . 393 | 372/393 (94%) | |
| | (Mouse), 393 aa. | | | |
| Q9BSR0 | Similar to hypothetical | 106 . . . 298 | 193/193 (100%) | e−117 |
| | protein FLJ10052 - | 49 . . . 241 | 193/193 (100%) | |
| | Homo sapiens (Human), | | | |
| | 290 aa. | | | |
| Q9NWG0 | Hypothetical 26.1 kDa | 106 . . . 242 | 137/137 (100%) | 8e−82 |
| | protein - Homo sapiens | 49 . . . 185 | 137/137 (100%) | |
| | (Human), 236 aa. | | | |
| Q92537 | Hypothetical protein | 299 . . . 491 | 83/206 (40%) | 2e−30 |
| | KIAA0247 - Homo sapiens | 39 . . . 241 | 114/206 (55%) | |
| | (Human), 303 aa. | | | |

[0398] PFam analysis predicts that the NOV6a protein contains the domains shown in the Table 6E.

TABLE 6E
Domain Analysis of NOV6a

| | | Identities/ | |
|---|---|---|---|
| | NOV6a Match | Similarities for | |
| Pfam Domain | Region | the Matched Region | Expect Value |
| sushi | 114 . . . 174 | 18/66 (27%) | 7.2e−07 |
| | | 44/66 (67%) | |
| sushi | 179 . . . 234 | 17/66 (26%) | 1.5e−10 |
| | | 47/66 (71%) | |
| sushi | 237 . . . 294 | 18/66 (27%) | 6.4e−13 |
| | | 43/66 (65%) | |
| sushi | 302 . . . 361 | 18/68 (26%) | 4e−08 |
| | | 44/68 (65%) | |

### Example 7

[0399] The NOV7 clone was analyzed, and the nucleotide and encoded polypeptide sequences are shown in Table 7A.

TABLE 7A
NOV7 Sequence Analysis

| | |
|---|---|
| SEQ ID NO: 21 | 1089 bp |

| | |
|---|---|
| NOV7a, | GGCTGTGGGTGCTTCACTATGGCGACGGTGGGGGCTCCGCGGCACTTCTCCCGCTGCG |
| CG153042-01 DNA | |
| Sequence | CCTGCTTCTGCACCGATAACTTGTACGTGGCGCGCTATGGGCTGCACGTGCGCTTCCG |
| | AGGCGAGCAGCAGCTGCCCCGGGACTACGGCCAGATCCTGCGCAGCCGAGGCTCTGTT |
| | AGCGCCAAGGACTTCCAGCAGCTGTTAGCAGACGTACTTGAGCAGGAGGTGGAGCGGC |
| | GGCAGCGGCTGGGGCAGGAGTCAGCAGCTAGGAAAGCCCTCATCGCGAGTTCCTACCA |
| | CCCGGCACGGCCTGAGGTCTACGACTCACTGCAGGATGCAGCTCTGGCCCCCGAGTTC |
| | CTGGCCGTGACTGAGTACAGCGTGTCCCCAGACGCAGACCTCAAGGGCCTTCTCCAGC |
| | GGCTGGAGACAGTATCGGAGGAGAACCGCATCTACCGGGTGCCTCTTTTCACAGCGCC |
| | CTTCTGCCAGGCCCTGCTGGAAGAGCTGGAGCACTTCGAGCAATCGGACATGCCTAAG |
| | GGGAGGCCCAACACCATGAACAACTACGGGGTGCTGCTGCACGAGCTCGGGCTGGACG |
| | AGCCGCTGATGACACCACTGCGGGAGCGCTTCCTGCAGCCGCTGATGGCCCTGCTGTA |
| | CCCTGACTGTGGCGGCGGCCGGCTCGACAGCCACCGGGCCTTTGTGGTCAAATACGCA |
| | CCGGGCCAGGACCTGGAGCTGGGCTGCCACTATGATAATGCCGAGCTCACCCTCAATG |
| | TGGCCTTGGGCAAGGTCTTCACAGGGGGCGCCCTGTATTTTGGGGGCCTCTTCCAGGC |
| | ACCCACAGCCCTGACGGAGCCCCTGGAGGTGGAGCACGTGGTGGGCCAGGGTGTCCTC |
| | CACCGTGGCGGCCADCTGCATGGAGCCCGGCCCTTGGGCACTGGTGAGCGTTGGAACC |
| | TTGTCGTCTGGCTCCGAGCCTCTGCTGTGCGCAACAGCCTCTGTCCCATGTGCTGCCG |
| | TGAGCCCGACCTGGTOGACGATGAGGGCTTCGGTGATGGCTTCACCCGAGAGGAGCCC |
| | GCCACGGTGGATGTATGTGCGCTCACCTGAGCTTGCTTGGGCCCA |

| | |
|---|---|
| ORF Start: ATG at 19 | ORF Stop: TGA at 1072 |

| | | |
|---|---|---|
| SEQ ID NO: 22 | 351 aa | MW at 39126.1 kD |

| | |
|---|---|
| NOV7a, | MATVGAPRHFCRCACFCTDNLYVARYGLHVRFRGEQQLRRDYGQILRSRGCVSAKDFQ |
| CG153042-01 | |
| Protein Sequence | QLLAEVLEQEVERRQRLGQESAARKALIASSYHPARPEVYDSLQDAALAPEFLAVTEY |
| | SVSPDADLKGLLQRLETVSEEKRIYRVPVFTAPFCQALLEELEHFEQSDMPKGRPNTM |
| | NNYGVLLHELGLDEPLMTPLRERFLQPLMALLYPDCGGGRLDSHRAFVVKYAPGQDLE |
| | LGCHYDNAELTLNVALGKVFTGGALYFGGLFQAPTALTEPLEVEHVVGQGVLHRGGQL |
| | HGARPLGTGERWNLVVWLRASAVRNSLCPMCCREPDLVDDEGFGDGFTREEPATVDVC |
| | ALT |

| | |
|---|---|
| SEQ ID NO: 23 | 1075 bp |

| | |
|---|---|
| NOV7b | CACCGGATCCACCATGGCGACGGTGGGGGCTCCGCGGCACTTCTGCCGCTGCGCCTCC |
| CG153042-02 DNA | |
| Sequence | TTCTGCACCGATAACTTGTACGTGGCGCGCTATGGGCTGCACGTGCGCTTCCGAGGCG |
| | AGCAGCAGCTGCGCCGGGACTACGGCCCGATCCTGCGCAGCCGAGGCTGTGTTAGCGC |
| | CAAGGACTTCCAGCAGCTGTTAGCAGAGCTTGAGCAGGAGGTGGAGCGGCGGCAGCGG |
| | CTGGGGCAGGAGTCAGCAGCTAGGAAAGCCCTCATCGCGAGTTCCTACCACCCGGCAC |
| | GGCCTGAGGTCTACGACTCACTGCAGGATGCAGCTCTGGCCCCCGAGTTCCTGGCCGT |
| | GACTGACTACAGCGTGTCCCCAGACGCAGACCTCAAGGGCCTTCTCCAGCGGCTGGAG |
| | ACAGTATCGGAGGAGAAGCGCATCTACCCGGTGCCTGTTTTCACAGCGCCCTTCTGCC |
| | AGGCCCTGCTGGAAGAGCTGGAGCACTTCGAGCAATCGGACATGCCTAAGGGGAGGCC |
| | CAACACCATGAACAACTACGCCGTGCTGCTGCACGAGCTCGGGCTGGACGAGCCCCTG |
| | ATGACACCACTGCGGGACCGCTTCCTGCAGCCGCTCATGGCCCTGCTGTACCCTGACT |
| | GTGGCGGGGGCCGGCTCGACAGCCACCGGGCCTTTGTGGTCAAATACGCACCGGGCCA |
| | GGACCTGGAGCTGGGCTGCCACTATGATAATGCCGAGCTCACCCTCAATGTGGCCTTG |
| | GGCAAGGTCTTCACAGGGGGCGCCCTGTATTTTGGGGGCCTCTTCCAGGCACCCACAG |
| | CCCTGACCGAGCCCCTGGAGGTGGAGCACGTGGTGGGCCAGCGTGTCCTCCACCGTGG |
| | CGGCCAGCTGCATGGAGCCCGGCCCTTGGGCACTGGTGAGCGTTGGAACCTTGTCGTC |
| | TGGCTCCGAGCCTCTGCTGTGCGCAACAGCCTCTGTCCCATGTGCTGCCGTGAGCCCG |
| | ACCTGGTGGACGATGAGGGCTTCGGTGATGGCTTCACCCGAGAGGAGCCCGCCACGGT |
| | GGATGTATGTGCGCTCACCTAGGTCGACGGC |

| | |
|---|---|
| ORF Start: ATG at 14 | ORF Stop: TAG at 1064 |

| | | |
|---|---|---|
| SEQ ID NO: 24 | 350 aa | MW at 38996.0 kD |

| | |
|---|---|
| NOV7b, | MATVGAPRHFCRCACFCTDNLYVARYGLHVRFRGEQQLRRDYGPILRSRGCVSAKDFQ |
| CG153042-02 | |
| Protein Sequence | QLLAELEQEVERRQRLGQESAARKALIASSYHPARPEVYDSLQDAALAPEFLAVTEYS |
| | VSPDADLKGLLQRLETVSEEKRIYRVPVFTAPFCQALLEELEHFEQSDMPKGRPNTMN |
| | NYGVLLHELGLDEPLMTPLRERFLQPLMALLYPDCGGGRLDSHRAFVVKYAPGQDLEL |
| | GCHYDNAELTLNVALGKVFTGGALYFGGLFQAPTALTEPLEVEHVVGQGVLHRGGQLH |
| | GARPLGTGERNNLVVWLRASAVRNSLCPMCCREPDLVDDEGFGDGFTREEPATVDVCA |
| | LT |

[0400] Sequence comparison of the above protein sequences yields the following sequence relationships shown in Table 7B.

TABLE 7B
Comparison of NOV7a against NOV7b.

| | | Identities/ |
|---|---|---|
| | NOV7a Residues/ | Similarities for |
| Protein Sequence | Match Residues | the Matched Region |
| NOV7b | 1 . . . 351 | 349/351 (99%) |
| | 1 . . . 350 | 349/351 (99%) |

[0401] Further analysis of the NOV7a protein yielded the following properties shown in Table 7C.

TABLE 7C
Protein Sequence Properties NOV7a

| | |
|---|---|
| PSort | 0.6500 probability located in plasma membrane; |
| analysis: | 0.4763 probability located in mitochondrial |
| | matrix space; 0.4500 probability located in |
| | cytoplasm; 0.2150 probability located |
| | in lysosome (lumen) |
| SignalP | Cleavage site between residues 12 and 13 |
| analysis: | |

[0402] A search of the NOV7a protein against the Geneseq database, a proprietary database that contains sequences published in patents and patent publication, yielded several homologous proteins shown in Table 7D.

TABLE 7D
Geneseq Results for NOV7a

| | | NOV7a | Identities/ | |
|---|---|---|---|---|
| | | Residues/ | Similarities | |
| Geneseq | Protein/Organism/Length | Match | for the | Expect |
| Identifier | [Patent #, Date] | Residues | Matched Region | Value |
| AAB94678 | Human protein sequence | 65 . . . 351 | 287/287 (100%) | e−169 |
| | SEQ ID NO: 15628 - | 4 . . . 290 | 287/287 (100%) | |
| | Homo sapiens, | | | |
| | February 2001] | | | |
| AAG45676 | Arabidopsis thaliana | 86 . . . 314 | 87/238 (36%) | 2e−36 |
| | protein fragment | 27 . . . 256 | 126/238 (52%) | |
| | SEQ ID NO: 57373 - | | | |
| | Arabidopsis thaliana, | | | |
| | 310 aa. [EP1033405-A2, | | | |
| | 06 SEP. 2000] | | | |
| AAG45675 | Arabidopsis thaliana | 86 . . . 314 | 87/238 (36%) | 2e−36 |
| | protein fragment SEQ ID | 105 . . . 334 | 126/238 (52%) | |
| | NO: 57372 - Arabidopsis | | | |
| | thaliana, 388 aa. | | | |
| | [EP1033405-A2, | | | |
| | 06 SEP. 2000] | | | |
| AAG45674 | Arabidopsis thaliana | 86 . . . 314 | 87/238 (36%) | 2e−36 |
| | protein fragment | 114 . . . 343 | 126/238 (52%) | |
| | SEQ ID NO: 57371 - | | | |
| | Arabidopsis thaliana, | | | |
| | 397 aa. [EP1033405-A2, | | | |
| | 06 SEP. 2000] | | | |
| AAG06884 | Arabidopsis thaliana | 86 . . . 314 | 87/238 (36%) | 2e−36 |
| | protein fragment SEQ | 27 . . . 256 | 126/238 (52%) | |
| | ID NO: 3823 - | | | |
| | Arabidopsis thaliana, | | | |
| | 310 aa. [EP1033405-A2, | | | |
| | 06 SEP. 2000] | | | |

[0403] In a BLAST search of public sequence datbases, the NOV7a protein was found to have homology to the proteins shown in the BLASTP data in Table 7E.

TABLE 7E
Public BLASTP Results for NOV7a

| | | NOV7a | Identities/ | |
|---|---|---|---|---|
| Protein | | Residues/ | Similarities | |
| Accession | | Match | for the | Expect |
| Number | Protein/Organism/Length | Residues | Matched Portion | Value |
| Q9CQ04 | 5730405M13Rik | 1 . . . 351 | 300/351 (85%) | e−175 |
| | protein - Mus musculus | 1 . . . 349 | 319/351 (90%) | |
| | (Mouse), 349 aa. | | | |
| Q9H8K6 | CDNA FLJ13491 fis, | 65 . . . 351 | 287/287 (100%) | e−168 |
| | clone PLACE1004274 - | 4 . . . 290 | 287/287 (100%) | |
| | Homo sapiens | | | |
| | (Human), 290 aa. | | | |
| Q9DBJ4 | 1300006G11Rik | 181 . . . 351 | 148/171 (86%) | 7e−85 |
| | protein (RIKEN cDNA | 1 . . . 171 | 157/171 (91%) | |
| | 1300006G11 gene) - | | | |
| | Mus musculus (Mouse), | | | |
| | 171 aa. | | | |
| Q93W24 | B1080D07.28 protein | 140 . . . 324 | 84/199 (42%) | 3e−37 |
| | (P0507H06.12 protein) - | 182 . . . 379 | 117/199 (58%) | |
| | Oryza sativa | | | |
| | (Rice), 404 aa. | | | |
| Q9LV19 | Gb\|AAB72163.1 | 86 . . . 314 | 82/239 (34%) | 1e−33 |
| | (Unknown protein) - | 122 . . . 351 | 125/239 (51%) | |
| | Arabidopsis thaliana | | | |
| | (Mouse-ear cress), | | | |
| | 394 aa. | | | |

[0404] PFam analysis predicts that the NOV7a protein contains the domains shown in the Table 7F.

TABLE 7F
Domain Analysis of NOV7a

| | | | |
|---|---|---|---|
| | | Identities/ | |
| | NOV7a Match | Similarities for | |
| Pfam Domain | Region | the Matched Region | Expect Value |

No Significant Matches Found

### Example 8

[0405] The NOV8 clone was analyzed, and the nucleotide and encoded polypepfide sequences are shown in Table 8A.

TABLE 8A
NOV8 Sequence Analysis

| | |
|---|---|
| SEQ ID NO: 25 | 1051 bp |

| | |
|---|---|
| NOV8a, | GAACCAGTAGCCGCGGCTGCTTCTGTTGCCCCGGTCGGTGGTCGTTATGGATTCTCCA |
| CG153179-01 DNA | |
| Sequence | TGGGACGAGTTGGCTCTGGCCTTCTCCCGCACGTCCATGTTTCCCTTTTTTGACATCG |
| | CGCACTATCTAGTGTCAGTGATGGCGGTGAAACGTCAGCCGGGAGCAGCTGCATTGGC |
| | ATGGAAGAATCCTATTTCAAGCTGGTTTACTGCTATGCTCCACTGTTTTGGTGGAGGA |
| | ATTTTATCCTGTCTACTGCTTOCAGAGCCTCCATTGAAGTTTCTTGCAAACCACACTA |
| | ACATATTACTGGCATCTTCAATCTGGTATATTACATTTTTTTGCCCGCATGACCTAGT |
| | TTCCCAGGGCTATTCATATCTACCTGTTCAACTACTGGCTTCGGGAATGAAGGAAGTG |
| | ACCAGAACTTGGAAAATAGTAGGTGGAGTCACACATGCTAATAGCTATTACAAAAATG |
| | GCTGGATAGTCATGATAGCTATTGGATGGGCCCGAGGTGCGGGTGGTACCATTATAAC |
| | GAATTTTGAGAGGTTGGTAAAAGGAGATTGGAAACCAGAAGGTCATGAATGGCTGAAG |
| | ACGTCATATTTTAGGGTACATGTGCAGAACGTGCAGGTTTGTTACATATGTATACATG |
| | TGCCATGTTGGTGTGCTACACCCATTAACTCGTCATTTAACATTAGCCCTGCCAAGGT |
| | AACCCTGCTGGGGTCAGTTATCTTCACATTCCAGCACACCCAGCATCTGGCAATATCA |
| | AAGCATAATCTTATGTTCCTTTATACCATCTTTATTGTGGCCACAAAGATAACCATGA |
| | TGACTACACAGACTTCTACTATGACATTTGCTCCTTTTGAGGATACATTGAGTTGGAT |
| | GCTATTTGGCTGGCAGCAGCCGTTTTCATCATGTGAGAAGAAAAGTGAAGCAAAGTCA |
| | CCTTCCAATGGCGTTGGGTCATTGGCCTCAAAGCCGGTAGATGTTGCCTCAGATAATG |
| | TTAAAAAGAAACATACTAAGAAGAATGAATAATTTACGTGATGAGCTCTACAAGGCCA |
| | AAAATTT |

| | |
|---|---|
| ORF Start: ATG at 47 | ORF Stop: TAA at 1016 |

| | | |
|---|---|---|
| SEQ ID NO: 26 | 323 aa | MW at 36140.7 kD |

| | |
|---|---|
| NOV8a, | MDSPWDELALAFSRTSMFPFFDIAHYLVSVMAVKRQPGAAALAWKNPISSWFTAMLHC |
| CG153179-01 | |
| Protein Sequence | FGGGILSCLLLAEPPLKFLANHTNILLASSIWYITFFCPHDLVSQGYSYLPVQLLASG |
| | MKEVTRTWKIVGGVTHANSYYKNGWIVMIAIGWARGAGGTIITNFERLVKGDWKPEGD |
| | EWLKTSYFRVHVQNVQVCYICIHVPCWCATPINSSFNISPAKVTLLGSVIFTFQHTQH |
| | LAISKHNLMFLYTIFIVATKITMMTTQTSTMTFAPFEDTLSWMLFGWQQPFSSCEKKS |
| | EAKSPSNGVGSLASKPVDVASDNVKKKHTKKNE |

[0406] Further analysis of the NOV8a protein yielded the following properties shown in Table 8B.

TABLE 8B
Protein Sequence Properties NOV8a

| | |
|---|---|
| PSort | 0.6000 probability located in plasma membrane; |
| analysis: | 0.4000 probability located in Golgi body; 0.3000 |
| | probability located in endoplasmic reticulum |
| | (membrane); 0.2397 probability |
| | located in mitochondrial inner membrane |
| SignalP | Cleavage site between residues 1 and 2 |
| analysis: | |

[0407] A search of the NOV8a protein against the Geneseq database, a proprietary database that contains sequences published in patents and patent publication, yielded several homologous proteins shown in Table 8C.

TABLE 8C
Geneseq Results for NOV8a

| | | NOV8a | Identities/ | |
|---|---|---|---|---|
| | | Residues/ | Similarities | |
| Geneseq | Protein/Organism/Length | Match | for the | Expect |
| Identifier | [Patent #, Date] | Residues | Matched Region | Value |
| AAB92881 | Human protein | 1 . . . 323 | 290/323 (89%) | e−168 |
| | sequence SEQ ID NO: | 1 . . . 291 | 290/323 (89%) | |
| | 11479 - Homo sapiens, | | | |
| | 291 aa. [EP1074617-A2, | | | |
| | 07 FEB. 2001] | | | |
| AAM41733 | Human polypeptide | 1 . . . 323 | 290/323 (89%) | e−168 |
| | SEQ ID NO 6664 - | 13 . . . 303 | 290/323 (89%) | |
| | Homo sapiens, 303 aa. | | | |
| | [WO200153312-A1, | | | |
| | 26 JUL. 2001] | | | |
| AAM39947 | Human polypeptide | 1 . . . 323 | 290/323 (89%) | e−168 |
| | SEQ ID NO 3092 - | 1 . . . 291 | 290/323 (89%) | |
| | Homo sapiens, 291 aa. | | | |
| | [WO200153312-A1, | | | |
| | 26 JUL. 2001] | | | |
| ABB89884 | Human polypeptide | 1 . . . 323 | 288/323 (89%) | e−166 |
| | SEQ ID NO 2260 - | 1 . . . 291 | 288/323 (89%) | |
| | Homo sapiens, 291 aa. | | | |
| | [WO200190304-A2, | | | |
| | 29 NOV. 2001] | | | |
| AAG74165 | Human colon cancer | 1 . . . 323 | 288/323 (89%) | e−166 |
| | antigen protein SEQ | 13 . . . 303 | 288/323 (89%) | |
| | ID NO: 4929 - Homo | | | |
| | sapiens, 303 aa. | | | |
| | [WO200122920-A2, | | | |
| | 5 APR. 2001] | | | |

[0408] In a BLAST search of public sequence datbases, the NOV8a protein was found to have homology to the proteins shown in the BLASTP data in Table 8D.

TABLE 8D
Public BLASTP Results for NOV8a

| | | NOV8a | Identities/ | |
|---|---|---|---|---|
| Protein | | Residues/ | Similarities | |
| Accession | | Match | for the | Expect |
| Number | Protein/Organism/Length | Residues | Matched Portion | Value |
| Q9NVV0 | CDNA FLJ10493 fis, | 1 . . . 323 | 290/323 (89%) | e−167 |
| | clone NT2RP2000274 | 1 . . . 291 | 290/323 (89%) | |
| | (Hypothetical 32.5 | | | |
| | kDa protein) - Homo | | | |
| | sapiens (Human), | | | |
| | 291 aa. | | | |
| Q9DAV9 | 1600017F22Rik protein | 1 . . . 323 | 210/325 (64%) | e−119 |
| | (RIKEN cDNA | 1 . . . 292 | 243/325 (74%) | |
| | 1600017F22 gene) - Mus | | | |
| | musculus (Mouse), | | | |
| | 292 aa. | | | |
| Q9H6F2 | CDNA: FLJ22328 fis, | 7 . . . 321 | 121/324 (37%) | 9e−59 |
| | clone HRC05632 | 11 . . . 297 | 191/324 (58%) | |
| | (Unknown) (Protein for | | | |
| | MGC: 3169) - Homo | | | |
| | sapiens (Human), | | | |
| | 299 aa. | | | |
| Q91WL2 | Similar to hypothetical | 7 . . . 321 | 117/323 (36%) | 5e−57 |
| | protein MGC3169 | 11 . . . 296 | 187/323 (57%) | |
| | (Hypothetical 33.3 kDa | | | |
| | protein) - | | | |
| | Mus musculus | | | |
| | (Mouse), 298 aa. | | | |
| Q9VXG9 | CG4239 protein | 14 . . . 278 | 86/268 (32%) | 2e−33 |
| | (GH25683P) - | 15 . . . 249 | 134/268 (49%) | |
| | Drosophila | | | |
| | melanogaster | | | |
| | (Fruit fly), 276 aa. | | | |

[0409] PFam analysis predicts that the NOV8a protein contains the domains shown in the Table 8E.

TABLE 8E
Domain Analysis of NOV8a

| | | | |
|---|---|---|---|
| | | Identities/ | |
| | | Similarities for | |
| Pfam | NOV8a Match | the Matched | Expect |
| Domain | Region | Region | Value |

No Significant Matches Found

### Example 9

[0410] The NOV9 clone was analyzed, and the nucleotide and encoded polypeptide sequences are shown in Table 9A.

TABLE 9A
NOV9 Sequence Analysis

| | |
|---|---|
| SEQ ID NO: 27 | 823 bp |

| | |
|---|---|
| NOV9a, | GAATCGCCCTTCTGCCAGCTTAGTGGAAGCTCTGCTCTGGGTGGAGAGCAGCCTCGCT |
| CG153403-01 DNA | |
| Sequence | TTGGTGACGCACAGTGCTGGGACCCTCCAGGAGCCCCGGGATTGAAGGATGGTGGCGG |
| | CCGTCCTGCTGGGGCTGAGCTGGCTCTGCTCTCCCCTGGGAGCTCTGGTCCTGGACTT |
| | CAACAACATCAGGAGCTCTGCTGACCTGCATGGGGCCCGGAAGGGCTCACAGTGCCTG |
| | TCTGACACGGACTGCAATACCAGAAAGTTCTGCCTCCAGCCCCGCGATGAGAAGCCGT |
| | TCTGTGCTACATGTCGTGGGTTGCGGAGGAGGTGCCAGCGAGATGCCATGTGCTGCCC |
| | CGGGACACTCTGTGTGAACGATGTTTGTACTACGATGGAAGATGCAACCCCAATATTA |
| | GAAAGGCAGCTTGATGAGCAAGATGGCACACATGCAGAAGGAACAACTGGGCACCCAG |
| | TCCAGGAAAGCCAACTCAAAAGGAAGCCAAGTATTAAGAAATCACAAGGCAGGAAGGG |
| | ACAAGAGGGAGAAAGTTGTCTGAGAACTTTTCACTGTGGCCCTGGACTTTGCTGTGCT |
| | CGTCATTTTTGGACGAAAATTTGTAAGCCAGTCCTTTTGGAGGGACAGGTCTGCTCCA |
| | GAAGAGGGCATAAAGACACTGCTCAAGCTCCAGAAATCTTCCAGCGTTGCGACTGTGG |
| | CCCTGGACTACTGTGTCGAAGCCAATTGACCAGCAATCGGCAGCATGCTCGATTAAGA |
| | GTATGCCAAAAAATAGAAAAGCTATAGATATTTCAAAATAAAGAAGAATCCACATCCA |
| | AAGGCGATTCA |

| | |
|---|---|
| ORF Start: ATG at 107 | ORF Stop: TAG at 779 |

| | | |
|---|---|---|
| SEQ ID NO: 28 | 224 aa | MW at 24864.3 kD |

| | |
|---|---|
| NOV9a, | MVAAVLLGLSWLCSPLGALVLDFNNIRSSADLHGARKGSQCLSDTDCNTRKFCLQPRD |
| CG153403-01 | |
| Protein Sequence | EKPFCATCRGLRRRCQRDANCCPGTLCVNDVCTTMEDATPILERQLDEQDGTHAEGTT |
| | GHPVQESQLKRKPSIKKSQGRKGQEGESCLRTFDCGPGLCCARHFWTKICKPVLLEGQ |
| | VCSRRGHKDTAQAPEIFQRCDCGPGLLCRSQLTSNRQHARLRVCQKIEKL |

| | |
|---|---|
| SEQ ID NO: 29 | 630 bp |

| | |
|---|---|
| NOV9b, | TGGAGAGCAGCCTCGCTTTGGTGACGCACAGTGCTGGGACCCTCCAGGAGCCCCGGGA |
| CG153403-02 DNA | |
| Sequence | ATTGAAGGATGGTGGCGGCCGTCCTGCTGGGGCTGAGCTGGCTCTGCTCTCCCCTGGG |
| | AGCTCTGGTCCTGGACTTCAACAACATCAGGAGCTCTGCTGACCTGCATGGGGCCCGG |
| | AAGGGCTCACAGTGCCTGTCTGACACGGACTGCAATACCAGAAAGTTCTGCCTCCAGC |
| | CCCGCGATGAGAAGCCGTTCTGTGCTACATGTCGTGGGTTGCGGAGGAGGTGCCAGCG |
| | AGACGCCATGTGCTGCCCTGGGACACTCTGTGTGAACGGACAAGAGGGAGAAAGTTGT |
| | CTGAGAACTTTTGACTGTGGCCCTGGACTTTGCTGTGCTCGTCATTTTTGGACGAAAA |
| | TTTGTAAGCCAGTCCTTTTGGAGGGACAGGTCTGCTCCAGAAGAGGGCATAAAGACAC |
| | TGCTCAAGCTCCAGAAATCTTCCAGCGTTGCGACTGTGGCCCTGGACTACTGTGTCGA |
| | AGCCAATTGGCCAGCAATCGGCAGCATGCTCGATTAAGAGTATGCCAAAAAATAGAAA |
| | AGCTATAAATATTTCAAAATAAAGAAGATCCACATGCAAAGGCGATTCCA |

| | |
|---|---|
| ORF Start: ATG at 67 | ORF Stop: TAA at 586 |

| | | |
|---|---|---|
| SEQ ID NO: 30 | 173 aa | MW at 19176.1 kD |

| | |
|---|---|
| NOV9b, | MVAAVLLGLSWLCSPLGALVLDFNNIRSSADLHGARKGSQCLSDTDCNTRKFCLQPRD |
| CG153403-02 | |
| Protein Sequence | EKPFCATCRGLRRRCQRDAMCCPGTLCVNGQEGESCLRTFDCGPGLCCARHFWTKICK |
| | PVLLEGQVCSRRGHKDTAQAPEIFQRCDCGPGLLCRSQLASNRQHARLRVCQKIEKL |

| | |
|---|---|
| SEQ ID NO: 31 | 484 bp |

| | |
|---|---|
| NOV9c, | CACCGGATCCCTGCTCCTGGACTTCAACAACATCAGGAGCTCTGCTGACCTGCATGGG |
| 305037558 DNA | |
| Sequence | GCCCGGAAGGGCTCACAGTGCCTGTCTGACACGGACTGCAATACCAGAAAGTTCTGCC |
| | TCCAGCCCCGCGATGAGAAGCCGTTCTGTGCTACATGTCGTGGGTTGCGGAGGAGGTG |
| | CCAGCGAGACGCCATGTGCTGCCCTGGGACACTCTGTGTGAACGGACAAGAGGGAGAA |
| | AGTTGTCTGAGAACTTTTGACTGTGGCCCTGGACTTTGCTGTGCTCGTCATTTTTGGA |
| | CGAAAATTTGTAAGCCAGTCCTTTTGGAGGGACAGGTCTGCTCCAGAAGAGGGCATAA |
| | AGACACTGCTCAAGCTCCAGAAATCTTCCAGCGTTGCGACTGTGGCCCTGGACTACTG |
| | TGTCGAAGCCAATTGGCCAGCAATCGGCAGCATGCTCGATTAAGAGTATGCCAAAAAA |
| | TAGAAAAGCTACTCGAGGGC |

| | |
|---|---|
| ORF Start: at 2 | ORF Stop: end of sequence |

| | | |
|---|---|---|
| SEQ ID NO: 32 | 161 aa | MW at 17937.4 kD |

| | |
|---|---|
| NOV9c, | TGSLVLDFNNIRSSADLHGARKGSQCLSDTDCNTRKFCLQPRDEKPFCATCRGLRRRC |
| 305037558 | |
| Protein Sequence | QRDAMCCPGTLCVNGQEGESCLRTEDCGPGLCCARHFWTKICKPVLLECQVCSRRGHK |
| | DTAQAPEIEQRCDCGPGLLCRSQLASNRQHARLRVCQKIEKLLEG |

| | |
|---|---|
| SEQ ID NO: 33 | 541 bp |

| | |
|---|---|
| NOV9d, | CACCGGATCCACCATGGTGGCGGCCGTCCTGCTGGGGCTGAGCTGGCTCTGCTCTCCC |
| 305037512 DNA | |
| Sequence | CTGGGAGCTCTGGTCCTGGACTTCAACAACATCAGGAGCTCTGCTGACCTGCATGGGG |
| | CCCGGAAGGGCTCACAGTGCCTGTCTGACACGGACTGCAATACCAGAAAGTTCTGCCT |
| | CCAGCCCCGCGATGAGAAGCCGTTCTGTGCTACATGTCGTGGGTTGCGGAGGAGGTGC |
| | CAGCGAGACGCCATGTGCTGCCCTGGGACACTCTGTGTGAACGGACAAGAGGGAGAAA |
| | GTTGTCTGAGAACTTTTGACTGTGGCCCTGGACTTTGCTGTGCTCGTCATTTTTGGAC |
| | GAAAATTTGTAAGCCAGTCCTTTTGGAGGGACAGGTCTGCTCCAGAAGAGGGCATAAA |
| | GACACTGCTCAAGCTCCAGAAATCTTCCAGCGTTGCGACTGTGGCCCTGGACTACTGT |
| | GTCGAAGCCAATTGGCCAGCAATCGGCAGCATGCTCGATTAAGAGTATGCCAAAAAAT |
| | AGAAAAGCTACTCGAGGGC |

| | |
|---|---|
| ORF Start: at 2 | ORF Stop: end of sequence |

| | | |
|---|---|---|
| SEQ ID NO: 34 | 180 aa | MW at 19821.7 kD |

| | |
|---|---|
| NOV9d, | TGSTMVAAVLLGLSWLCSPLGALVLDFNNIRSSADLHGARKGSQCLSDTDCNTRKFCL |
| 305037512 | |
| Protein Sequence | QPRDEKPFCATCRGLRRRCQRDAMCCPGTLCVNGQEGESCLRTFDCGPGLCCARHFWT |
| | KICKPVLLEGQVCSRRGHKDTAQAPEIFQRCDCGPGLLCRSQLASNRQHARLRVCQKI |
| | EKLLEG |

[0411] Sequence comparison of the above protein sequences yields the following sequence relationships shown in Table 9B.

TABLE 9B
Comparison of NOV9a against NOV9b through NOV9d.

| | | Identities/ |
|---|---|---|
| | | Similarities for |
| Protein | NOV9a Residues/ | the Matched |
| Sequence | Match Residues | Region |
| NOV9b | 1 . . . 224 | 172/224 (76%) |
| | 1 . . . 173 | 172/224 (76%) |
| NOV9c | 17 . . . 224 | 155/208 (74%) |
| | 2 . . . 158 | 156/208 (74%) |
| NOV9d | 1 . . . 224 | 172/224 (76%) |
| | 5 . . . 177 | 172/224 (76%) |

[0412] Further analysis of the NOV9a protein yielded the following properties shown in Table 9C.

TABLE 9C
Protein Sequence Properties NOV9a

| | |
|---|---|
| PSort | 0.7284 probability located in outside; 0.1000 |
| analysis: | probability located in endoplasmic reticulum |
| | (membrane); 0.1000 probability located in |
| | endoplasmic reticulum (lumen); 0.1000 |
| | probability located in microbody (peroxisome) |
| SignalP | Cleavage site between residues 19 and 20 |
| analysis: | |

[0413] A search of the NOV9a protein against the Geneseq database, a proprietary database that contains sequences published in patents and patent publication, yielded several homologous proteins shown in Table 9D.

TABLE 9D
Geneseq Results for NOV9a

| | | NOV9a | Identities/ | |
|---|---|---|---|---|
| | | Residues/ | Similarities | |
| Geneseq | Protein/Organism/Length | Match | for the | Expect |
| Identifier | [Patent #, Date] | Residues | Matched Region | Value |
| AAY92075 | Human DKR-4 - | 1 . . . 224 | 222/224 (99%) | e−135 |
| | Homo sapiens, 224 aa. | 1 . . . 224 | 223/224 (99%) | |
| | [WO200018914-A2, | | | |
| | 06 APR. 2000] | | | |
| AAB08875 | Amino acid sequence | 1 . . . 224 | 222/224 (99%) | e−135 |
| | of a human Dickkopf | 1 . . . 224 | 223/224 (99%) | |
| | (Dkk)-4 protein - | | | |
| | Homo sapiens, 224 aa. | | | |
| | [WO200052047-A2, | | | |
| | 08 SEP. 2000] | | | |
| AAW73017 | Human cysteine-rich | 1 . . . 224 | 222/224 (99%) | e−135 |
| | secreted protein | 1 . . . 224 | 223/224 (99%) | |
| | CRSP-2 - Homo sapiens, | | | |
| | 224 aa. [WO9846755-A1, | | | |
| | 22 OCT. 1998] | | | |
| AAB66109 | Protein of the | 34 . . . 221 | 84/199 (42%) | 2e−37 |
| | invention #21 - | 65 . . . 259 | 109/199 (54%) | |
| | Unidentified, 259 aa. | | | |
| | [WO200078961-A1, | | | |
| | 28 DEC. 2000] | | | |
| AAU29148 | Human PRO polypeptide | 34 . . . 221 | 84/199 (42%) | 2e−37 |
| | sequence #125 - | 65 . . . 259 | 109/199 (54%) | |
| | Homo sapiens, 259 aa. | | | |
| | [WO200168848-A2, | | | |
| | 20 SEP. 2001] | | | |

[0414] In a BLAST search of public sequence datbases, the NOV9a protein was found to have homology to the proteins shown in the BLASTP data in Table 9E.

TABLE 9E
Public BLASTP Results for NOV9a

| | | NOV9a | Identities/ | |
|---|---|---|---|---|
| Protein | | Residues/ | Similarities | |
| Accession | | Match | for the | Expect |
| Number | Protein/Organism/Length | Residues | Matched Portion | Value |
| Q9UBT3 | Dickkopf related | 1 . . . 224 | 222/224 (99%) | e−135 |
| | protein-4 precursor | 1 . . . 224 | 223/224 (99%) | |
| | (Dkk-4) (Dickkopf-4) | | | |
| | (hDkk-4) - Homo sapiens | | | |
| | (Human), 224 aa. | | | |
| Q8VEJ3 | Similar to dickkopf | 1 . . . 221 | 166/221 (75%) | e−101 |
| | (Xenopus laevis) | 1 . . . 221 | 185/221 (83%) | |
| | homolog 4 - Mus musculus | | | |
| | (Mouse), 221 aa. | | | |
| Q9UBU2 | Dickkopf related | 34 . . . 221 | 84/199 (42%) | 7e−37 |
| | protein-2 precursor | 65 . . . 259 | 109/199 (54%) | |
| | (Dkk-2) (Dickkopf-2) | | | |
| | (hDkk-2) - Homo sapiens | | | |
| | (Human), 259 aa. | | | |
| Q9QYZ8 | Dickkopf related | 34 . . . 221 | 85/200 (42%) | 9e−37 |
| | protein-2 precursor | 65 . . . 259 | 109/200 (54%) | |
| | (Dkk-2) (Dickkopf-2) | | | |
| | (mDkk-2) - Mus musculus | | | |
| | (Mouse), 259 aa. | | | |
| Q9PWH3 | Dickkopf1 - | 41 . . . 220 | 84/184 (45%) | 1e−36 |
| | Brachydanio | 68 . . . 239 | 105/184 (56%) | |
| | rerio (Zebrafish) | | | |
| | (Zebra danio), 240 aa. | | | |

[0415] PFam analysis predicts that the NOV9a protein contains the domains shown in the Table 9F.

TABLE 9F
Domain Analysis of NOV9a

| | | | |
|---|---|---|---|
| | | Identities/ | |
| | | Similarities for | |
| Pfam | NOV9a Match | the Matched | Expect |
| Domain | Region | Region | Value |

No Significant Matches Found

### Example 10

[0416] The NOV10 clone was analyzed, and the nucleotide and encoded polypeptide sequences are shown in Table 10A.

TABLE 10A
NOV10 Sequence Analysis

| | |
|---|---|
| SEQ ID NO: 35 | 878 bp |

| | |
|---|---|
| NOV10a, | ATGCCGCGCTTGTCTCTGCTCTTGCCGCTGCTGCTTCTGCTGCTGCTGCCGCTGCTGC |
| CG153424-01 DNA | |
| Sequence | CGCCGCTGTCCCCGAGCCTTGGGATCCGCGACGTGCGCGGCCGGCGCCCCAAGTGTGG |
| | TCCGTGCCGGCCAGAGGGCTGCCCGGCGCCTGCGCCCTGCCCGGCGCCCGGGATCTCG |
| | GCGCTCGACGAGTCCGGCTGCTGCGCCCGCTGCCTGGGAGCCGAGGGCGCGAGCTGCG |
| | GGGGCCGCGCCGGCGGGCGCTGTGGCCCCGGCCTGGTATGCGCGAGCCAGGCCGCTGG |
| | GGCAGCGCCCGACGGCACCGGGCTCTGCGTGTGCGCGCAGCGCGGCACCGTCTGCGGC |
| | TCCGACGGTCGCTCGTACCCCAGCGTCTGCGCGCTGCGCCTGCCCGCTCGGCACACGC |
| | CCCGCGCGCACCCCGGTCACCTGCACAAGGCGCGCGACGGCCCTTGCGAGTTCGCTCC |
| | TGTGGTCGTCGTTCCTCCCCGAAGTGTTCACAACGTCACCGGGGCGCAGGTGGGCCTC |
| | TCCTGTGAAGTGAGGGCTGTGCCTACCCCAGTCATCACGTGGAGAAAGGTAACGAAGT |
| | CCCCTGAGGGCACCCAAGCACTGGAGGAGCTGCCTGGGGACCATGTCAATATAGCTGT |
| | CCAAGTGCGAGGGGGCCCTTCTGACCATGAGGCCACCGCCTGGATTTTGATCAACCCC |
| | CTGCGAAAGGAGGATGAGGGTGTGTACCAGTGCCATGCAGCCAACATGGTGGGAGAGG |
| | CTGAGTCCCACAGCACAGTGACGGTTCTAGATCTGAGTAAATACAGGAGCTTCCACTT |
| | CCCAGCTCCCGATGACCGCATGTGATGGAGAAATGTACATGTTCTAAGTCATTTTCAG |
| | TATTTTAC |

| | |
|---|---|
| ORF Start: ATG at 1 | ORF Stop: TGA at 835 |

| | | |
|---|---|---|
| SEQ ID NO: 36 | 278 aa | MW at 29005.1 kD |

| | |
|---|---|
| NOV10a, | MPRLSLLLPLLLLLLLPLLPPLSPSLGIRDVGGRRPKCGPCRPEGCPAPAPCPAPGIS |
| CG153424-01 | |
| Protein Sequence | ALDECGCCARCLGAEGASCGGRAGGRCGPGLVCASQAAGAAPEGTGLCVCAQRGTVCG |
| | SDGRSYPSVCALRLRARHTPRAHPGHLHKARDGPCEFAPVVVVPPRSVHNVTGAQVGL |
| | SCEVRAVPTPVITWRKVTKSPEGTQALEELPGDHVNIAVQVRGGPSDHEATAWILIMP |
| | LRKEDEGVYQCHAANMVGEAESHSTVTVLDLSKYRSFHFPAPDDRM |

[0417] Further analysis of the NOV10a protein yielded the following properties shown in Table 10B.

TABLE 10B
Protein Sequence Properties NOV10a

| | |
|---|---|
| PSort | 0.8200 probability located in endoplasmic |
| analysis: | reticulum (membrane); 0.1900 probability |
| | located in plasma membrane; 0.1000 probability |
| | located in endoplasmic reticulum (lumen); |
| | 0.1000 probability located in outside |
| SignalP | Cleavage site between residues 28 and 29 |
| analysis: | |

[0418] A search of the NOV 10a protein against the Geneseq database, a proprietary database that contains sequences published in patents and patent publication, yielded several homologous proteins shown in Table 10C.

TABLE 10C
Geneseq Results for NOV10a

| | | NOV10a | Identities/ | |
|---|---|---|---|---|
| | | Residues/ | Similarities | |
| Geneseq | Protein/Organism/Length | Match | for the | Expect |
| Identifier | [Patent #, Date] | Residues | Matched Region | Value |
| AAU08753 | Human insulin-like | 1 . . . 278 | 278/278 (100%) | e−169 |
| | growth factor binding | 1 . . . 278 | 278/278 (100%) | |
| | protein-like | | | |
| | polypeptide #3 - | | | |
| | Homo sapiens, 278 aa. | | | |
| | [WO200175064-A2, | | | |
| | 11 OCT. 2001] | | | |
| AAE15654 | Human growth factor | 1 . . . 278 | 276/282 (97%) | e−164 |
| | binding protein-like | 1 . . . 282 | 276/282 (97%) | |
| | protein, NOV5 - | | | |
| | Homo sapiens, 282 aa. | | | |
| | [WO200194416-A2, | | | |
| | 13 DEC. 2001] | | | |
| AAU08755 | Human insulin-like | 1 . . . 156 | 154/156 (98%) | 4e−93 |
| | growth factor binding | 1 . . . 156 | 155/156 (98%) | |
| | protein-like | | | |
| | polypeptide #2 - | | | |
| | Homo sapiens, 390 aa. | | | |
| | [WO200175064-A2, | | | |
| | 11 OCT. 2001] | | | |
| ABG01683 | Novel human diagnostic | 1 . . . 156 | 154/156 (98%) | 4e−93 |
| | protein #1674 - | 1 . . . 156 | 155/156 (98%) | |
| | Homo sapiens, 390 aa. | | | |
| | [WO200175067-A2, | | | |
| | 11 OCT. 2001] | | | |
| AAR79102 | Prostaglandin I2 (PGI2) | 11 . . . 262 | 115/263 (43%) | 4e−59 |
| | prodn. promoter - Homo | 16 . . . 267 | 141/263 (52%) | |
| | sapiens, 282 aa. | | | |
| | [WO9429448-A, | | | |
| | 22 DEC. 1994] | | | |

[0419] In a BLAST search of public sequence datbases, the NOV10a protein was found to have homology to the proteins shown in the BLASTP data in Table 10D.

TABLE 10D
Public BLASTP Results for NOV10a

| | | NOV10a | Identities/ | |
|---|---|---|---|---|
| Protein | | Match | for the | Expect |
| Number | Protein/Organism/Length | Residues | Matched Portion | Value |
| Q8WX77 | BA113O24.1 (similar | 1 . . . 278 | 278/278 (100%) | e−169 |
| | to insulin-like growth | 1 . . . 278 | 278/278 (100%) | |
| | factor binding protein) - | | | |
| | Homo sapiens | | | |
| | (Human), 278 aa. | | | |
| BAA21725 | IGFBP-LIKE PROTEIN - | 1 . . . 276 | 212/276 (76%) | e−128 |
| | Mus musculus | 1 . . . 268 | 234/276 (83%) | |
| | (Mouse), 270 aa. | | | |
| Q07822 | MAC25 protein - | 11 . . . 262 | 115/263 (43%) | 1e−58 |
| | Homo sapiens | 16 . . . 267 | 141/263 (52%) | |
| | (Human), 277 aa. | | | |
| Q16270 | Insulin-like growth factor | 11 . . . 262 | 115/263 (43%) | 1e−58 |
| | binding protein 7 | 16 . . . 267 | 141/263 (52%) | |
| | precursor (IGFBP-7) | | | |
| | (IBP- 7) (IGF-binding | | | |
| | protein 7) (MAC25 protein) | | | |
| | (Prostacyclin-stimulating | | | |
| | factor) (PGI2-stimulating | | | |
| | factor) - Homo sapiens | | | |
| | (Human), 282 aa. | | | |
| Q61581 | Mac25 protein - Mus | 11 . . . 262 | 114/263 (43%) | 5e−57 |
| | musculus (Mouse), 281 aa. | 15 . . . 266 | 140/263 (52%) | |

[0420] PFam analysis predicts that the NOV 10a protein contains the domains shown in the Table 10E.

TABLE 10E
Domain Analysis of NOV10a

| | | Identities/ | |
|---|---|---|---|
| | | Similarities for | |
| Pfam | NOV10a Match | the Matched | Expect |
| Domain | Region | Region | Value |
| kazal | 91 . . . 151 | 18/63 (29%) | 7.5e−05 |
| | | 45/63 (71%) | |
| ig | 169 . . . 245 | 16/80 (20%) | 5.4e−08 |
| | | 59/80 (74%) | |

### Example 11

[0421] The NOV11 clone was analyzed, and the nucleotide and encoded polypeptide sequences are shown in Table 11A.

TABLE 11A
NOV11 Sequence Analysis

| | |
|---|---|
| SEQ ID NO: 37 | 1245 bp |

| NOV11a, | CAGGAACGGGCTCCGCGGACGACGCGCTCCAGGCACGCACAGGCAGCGGGCCTCCCAC | |
|---|---|---|
| CG157567-01 DNA | | |
| Sequence | CGCGCGTGCCGGGGGCGGGGGGGCTGCCCCCATGCGGGGCCCTTCCTGGTTGCGGCCT | |
| | CGGCCGCTGCTGCTGCTGTTGCTCCTGCTGTCGCCTTGGCCTGTCTGGGCCCATGTGT | |
| | CGGCCACGGCCTCGCCCTCGGGGTCCCTGGGCGCCCCGGACTGCCCCGAGGTGTGCAC | |
| | GTGCGTGCCGGGAGGCCTGGCCAGCTGCTCGGCACTCTCGCTGCCCGCCGTGCCCCCG | |
| | GGCCTGAGCCTGCGCCTGCGCGCGCTGCTGCTOGACCACAACCGCGTCCGTGCGCTGC | |
| | CGCCAGGTGCCTTCGCGGGAGCGGGCGCGCTACAGCGCCTGGACCTGCGCGAGAGCGG | |
| | GCTGCACTCGGTGCATGTGCGAGCCTTCTGGGGCCTGGGCGCGCTGCAGCTGCTGGAC | |
| | CTGAGCGCCAACCAGCTGGAAGCACTGGCACCAGGGACTTTCGCGCCGCTGCGCGCGC | |
| | TGCGCAACCTCTCATTGGCCGGCAACCGGCTGGCGCGCCTGGAGCCCGCGGCGCTAGG | |
| | CGCGCTCCCGCTGCTGCGCTCACTCAGCCTGCAGGACAACGAGCTGGCGGCACTCGCG | |
| | CCGGGGCTGCTGGCCCGCCTGCCCGCTCTAOACGCGCTGCACCTGCGCGGCGACCCTT | |
| | GGGGCTGCGGCTGCGCGCTGCGCCCGCTCTGCGCCTGGCTGCCCCGGCACCCGCTCCC | |
| | CGCGTCAGAGCCCGAGACGGTGCTCTGCGTGTGGCCGGGACGCCTGACGCTCAGCCCC | |
| | CTGACTGCCTTTTCCGACGCCGCCTTTAGCCATTGCGCGCAGCCGCTCGCCCTGCGGC | |
| | ACCTGOCCGTGGTTTACACGCTCGGGCCGGCCTCCTTCCTCGTCAGCCTGGCTTCCTG | |
| | CCTGGCGCTGGGCTCTGGGCTCACCGCCTGCCGTGCGCGCCGCCGCCGCCTCCGCACC | |
| | CCCGCCCTCCGCCCGCCGAGACCGCCAGACCCGAACCCCGATCCCGACCCCCACGGCT | |
| | GTGCCTCGCCCCCGGACCCGGGGAGCCCCGCCGCTGCCGCCCAAGCCTGAGCGGCCGC | |
| | GGCCGCCTGGAGCGCTCGAAGCTTCCCCCATGCCTTTGCCCTCCCTTTACACTGTCTG | |
| | CCGGCGTCAACAAGCGACACAGACCGAAAAAAAAAAAAAAAAAAAAAAAAAAAAAAAA | |
| | AAAAAAAAAAAAAAAAAACAAAAAATT | |
| | ORF Start: ATG at 90 | ORF Stop: TGA at 1092 |

| | | |
|---|---|---|
| SEQ ID NO: 38 | 334 aa | MW at 34891.0kD |

| | |
|---|---|
| NOV11a, | MRGPSWLRPRPLLLLLLLLSPWPVWAHVSATASPSGSLGAPDCPEVCTCVPGGLASCS |
| CG157567-01 | |
| Protein Sequence | ALSLPAVPPGLSLRLRALLLDHNRVRALPPGAFAGAGALQRLDLRENGLHSVHVRAFW |
| | GLGALQLLDLSANQLEALAPGTFAPLRALRNLSLAGNRLARLEPAALGALPLLRSLSL |
| | QDNELAALAPGLLGRLPALDALHLRGNPWGCGCALRPLCAWLRRHPLPASEAETVLCV |
| | WPGRLTLSPLTAFSDAAFSHCAQPLALRDLAVVYTLGPASFLVSLASCLALGSGLTAC |
| | RARRRRLRTAALRPPRPPDPNPDPDPHGCASPADPGSPAAAAQA |

[0422] Further analysis of the NOV11a protein yielded the following properties shown in Table 11B.

TABLE 11B
Protein Sequence Properties NOV11a

| | |
|---|---|
| PSort | 0.5947 probability located in outside; 0.1000 |
| analysis: | probability located in endoplasmic reticulum |
| | (membrane); 0.1000 probability located in |
| | endoplasmic reticulum (lumen); 0.1000 |
| | probability located in microbody (peroxisome) |
| SignalP | Cleavage site between residues 27 and 28 |
| analysis: | |

[0423] A search of the NOV11a protein against the Geneseq database, a proprietary database that contains sequences published in patents and patent publication, yielded several homologous proteins shown in Table 11C.

TABLE 11C
Geneseq Results for NOV11a

| | | NOV11a | Identities/ | |
|---|---|---|---|---|
| | | Residues/ | Similarities for | |
| Geneseq | Protein/Organism/Length | Match | the Matched | Expect |
| Identifier | [Patent #, Date] | Residues | Region | Value |
| AAY41496 | Fragment of human secreted | 40 . . . 334 | 235/303 (77%) | e−120 |
| | protein encoded by gene 70 - | 77 . . . 368 | 240/303 (78%) | |
| | Homo sapiens, 368 aa. | | | |
| | [WO9947540-A1, 23 SEP. 1999] | | | |
| AAB07469 | A human leucine-rich repeat | 9 . . . 290 | 93/284 (32%) | 2e−28 |
| | protein designated Zlrr3 - | 14 . . . 286 | 126/284 (43%) | |
| | Homo sapiens, 298 aa. | | | |
| | [WO200042184-A1, 20 JUL. 2000] | | | |
| AAU12198 | Human PRO1341 polypeptide | 43 . . . 290 | 85/250 (34%) | 9e−28 |
| | sequence - Homo sapiens, 281 | 21 . . . 269 | 116/250 (46%) | |
| | aa. [WO200140466-A2, 07 JUN. | | | |
| | 2001] | | | |
| AAW96707 | Protein sequence of the | 34 . . . 237 | 73/204 (35%) | 8e−27 |
| | specification - Homo sapiens, | 273 . . . 472 | 107/204 (51%) | |
| | 1534 aa. [JP11018777-A, 26 | | | |
| | JAN. 1999] | | | |
| AAW96706 | Protein sequence of the | 34 . . . 237 | 73/204 (35%) | 8e−27 |
| | specification - Homo sapiens, | 247 . . . 446 | 107/204 (51%) | |
| | 1508 aa. [JP11018777-A, 26 | | | |
| | JAN. 1999] | | | |

[0424] In a BLAST search of public sequence datbases, the NOV11a protein was found to have homology to the proteins shown in the BLASTP data in Table 11D.

TABLE 11D
Public BLASTP Results for NOV11a

| | | NOV11a | Identities/ | |
|---|---|---|---|---|
| Protein | | Residues/ | Similarities for | |
| Accession | | Match | the Matched | Expect |
| Number | Protein/Organism/Length | Residues | Portion | Value |
| Q91W20 | Unknown (Protein for | 1 . . . 332 | 219/332 (65%) | e−112 |
| | MGC: 6965) (Hypothetical 35.7 | 1 . . . 328 | 235/332 (69%) | |
| | kDa protein) - Mus musculus | | | |
| | (Mouse), 331 aa. | | | |
| Q96B32 | Hypothetical 35.0 kDa | 62 . . . 285 | 81/226 (35%) | 6e−27 |
| | protein - Homo sapiens | 70 . . . 294 | 108/226 (46%) | |
| | (Human), 317 aa (fragment). | | | |
| BAA32465 | MEGF4 - Homo sapiens | 34 . . . 237 | 73/204 (35%) | 2e−26 |
| | (Human), 1618 aa (fragment). | 357 . . . 556 | 107/204 (51%) | |
| O75093 | Slit-1 protein - Homo | 34 . . . 237 | 73/204 (35%) | 2e−26 |
| | sapiens (Human), 1534 aa. | 273 . . . 472 | 107/204 (51%) | |
| Q9WVB5 | SLIT1 - Mus musculus | 30 . . . 237 | 72/208 (34%) | 4e−26 |
| | (Mouse), 1531 aa. | 269 . . . 472 | 109/208 (51%) | |

[0425] PFam analysis predicts that the NOV11a protein contains the domains shown in the Table 11E.

TABLE 11E
Domain Analysis of NOV11a

| | | Identities/ | |
|---|---|---|---|
| | | Similarities for | |
| Pfam | NOV11a Match | the Matched | Expect |
| Domain | Region | Region | Value |
| LRRNT | 42 . . . 70 | 13/31 (42%) | 0.86 |
| | | 20/31 (65%) | |
| LRR | 96 . . . 119 | 9/25 (36%) | 0.52 |
| | | 16/25 (64%) | |
| LRR | 120 . . . 143 | 11/25 (44%) | 0.043 |
| | | 18/25 (72%) | |
| LRR | 144 . . . 167 | 10/25 (40%) | 0.33 |
| | | 17/25 (68%) | |
| LRRCT | 201 . . . 254 | 18/55 (33%) | 0.0078 |
| | | 30/55 (55%) | |

### Example 12

[0426] The NOV12 clone was analyzed, and the nucleotide and encoded polypeptide sequences are shown in Table 12A.

TABLE 12A
NOV12 Sequence Analysis

| | |
|---|---|
| SEQ ID NO:39 | 838 bp |

| NOV12a, | TCAAAGGAAACTGACAAATTATCCCCACCTGCCAGAAGAAGAAATCCTCACTGGACGG | |
|---|---|---|
| CG157760-01 DNA | | |
| Sequence | CTTCCTGTTTCCTGTGGTTCATTATCTGATTGGCTGCAGGGATGAAAGTTTTTAAGTT | |
| | CATAGGACTGATGATCCTCCTCACCTCTGCGCTTTCAGCCGGTTCAGGACAAAGTCCA | |
| | ATCACTGTGCTGTGCTCCATAGACTGGTTCATGGTCACAGTGCACCCCTTCATGCTAA | |
| | ACAACGATGTGTGTGTACACTTTCATGAACTACACTTGGGCCTGGGTTGCCCCCCAAA | |
| | CCATGTTCAGCCACACGCCTACCAGTTCACCTACCGTGTTACTGAATGTGGCATCAGG | |
| | GCCAAAGCTGTCTCTCAGGACATGGTTATCTACAGCACTGAGATACACTACTCTTCTA | |
| | AGGGCACGCCATCTAAGTTTGTGATCCCAGTGTCATGTGCTGCCCCCCAAAAGTCCCC | |
| | ATGGCTCACCAAGCCCTGCTCCATGAGAGTAGCCAGCAAGAGCAGGGCCACAGCCCAG | |
| | AAGGATGAGAAATGCTACGAGGTGTTCAGCTTGTCACAGTCCAGTCAAAGGCCCAACT | |
| | GCGATTGTCCACCTTGTGTCTTCAGTGAAGAAGACCATACCCAGGTCCCTTGTCACCA | |
| | AGCAGGGGCTCAGGAGGCTCAACCTCTGCAGCCATCTCACTTTCTTGATATTTCTGAG | |
| | GATTGGTCTCTTCACACAGATGATATGATTGGGTCCATGTGATCCTCAGGTTTGOGGT | |
| | CTCCTGAAGATGCTATTTCTAGAATTAGTATATAGTGTACAAATGTCTGACAAATAAG | |
| | TCCTCTTGTGACCCTCATTAAGGCCA | |
| | ORF Start: ATG at 100 | ORF Stop: TGA at 736 |

| | | |
|---|---|---|
| SEQ ID NO: 40 | 212 aa | MW at 23581.8kD |

| NOV12a, | MKVFKFIGLMILLTSALSAGSGQSPMTVLCSIDWFMVTVHPFMLNNDVCVHFHELHLG | |
|---|---|---|
| CG157760-01 | | |
| Protein Sequence | LGCPPNHVQPHAYQFTYRVTECGIRAKAVSQDMVIYSTEIHYSSKGTPSKFVIPVSCA | |
| | APQKSPWLTKPCSMRVASKSRATAQKDEKCYEVFSLSQSSQRPNCDCPPCVFSEEEHT | |
| | QVPCHQAGAQEAQPLQPSHFLDISEDWSLHTDDMIGSM | |
| | SEQ ID NO: 41 | 697 bp |

| NOV12b, | TCAAAGGAAACTOACAAATTATCCCCAGCTGCCAAAAGAAGAAATCCTCACTGGACGG | |
|---|---|---|
| CG157760-02 DNA | | |
| Sequence | CTTCCTGTTTCCTGTGGTTCATTATCTGATTGGCTGCAGGGATGAAAGTTTTTAAGTT | |
| | CATAGGACTGATGATCCTCCTCACCTCTGCGTTTTCAGCCGGTTCAGGACAAAGTCCA | |
| | ATGACTGTGCTGTGCTCCATAGACTGGTTCATGGTCACAGTGCACCCCTTCATGCTAA | |
| | ACAACGATGTGTGTGTACACTTTCATGAACTACACTTGGGCCTGGGTTCCCCCCCAAA | |
| | CCATGTTCAGCCACACGCCTACCAGTTCACCTACCGTGTTACTGAATGTGOCATCAGG | |
| | CCCAGCAAGAGCAGGGCCACAGCCCAGAAGGATGAGAAATGCTACGAGGTGTTCAGCT | |
| | TGTCACAGTCCAGTCAAAGGCCCAACTGCGATTGTCCACCTTGTGTCTTCAGTGAAGA | |
| | AGAGCATACCCAGGTCCCTTGTCACCAAGCAGGGGCTCAGGAGGCTCAACCTCTGCAG | |
| | CCATCTCACTTTCTTGATATTTCTGAGGATTGGTCTCTTCACACAGATGATATGATTG | |
| | GGTCCATGTGATCCTGAGGTTTGGGGTCTCCTGAAGATGCTATTTCTAGATTTAGTAT | |
| | ATAGTGTACAAATGTCTGACAAATAAGTGCTCTTGTGACCCTCATGTGAGGGCGATTC | |
| | C | |
| | ORF Start: ATG at 100 | ORF Stop: TGA at 589 |

| | | |
|---|---|---|
| SEQ ID NO: 42 | 163 aa | MW at 18277.GkD |

| | |
|---|---|
| NOV12b, | MKVFKFIGLMILLTSAFSAGSGQSPMTVLCSIDWFMVTVHPFMLNNDVCVHFHELHLG |
| CG157760-02 | |
| Protein Sequence | LGCPPNHVQPHAYQFTYRVTECGIRASKSRATAQKDEKCYEVFSLSQSSQRPNCDCPP |
| | CVFSEEEHTQVPCHQAGAQEAQPLQPSHFLDISEDWSLHTDDMIGSM |

[0427] Sequence comparison of the above protein sequences yields the following sequence relationships shown in Table 12B.

TABLE 12B
Comparison of NOV12a against NOV12b.

| | | Identities/ |
|---|---|---|
| | | Similarities for |
| Protein | NOV12a Residues/ | the Matched |
| Sequence | Match Residues | Region |
| NOV12b | 1 . . . 212 | 162/212 (76%) |
| | 1 . . . 163 | 162/212 (76%) |

[0428] Further analysis of the NOV12a protein yielded the following properties shown in

TABLE 12C
Protein Sequence Properties NOV12a

| | |
|---|---|
| PSort | 0.6568 probability located in outside; 0.1000 |
| analysis: | probability located in endoplasmic reticulum |
| | (membrane); 0.1000 probability located in |
| | endoplasmic reticulum (lumen); 0.1000 |
| | probability located in lysosome (lumen) |
| SignalP | Cleavage site between residues 23 and 24 |
| analysis: | |

[0429] A search of the NOV12a protein against the Geneseq database, a proprietary database that contains sequences published in patents and patent publication, yielded several homologous proteins shown in Table 12D.

TABLE 12D
Geneseq Results for NOV12a

| | | NOV12a | Identities/ | |
|---|---|---|---|---|
| | | Residues/ | Similarities for | |
| Geneseq | Protein/Organism/Length | Match | the Matched | Expect |
| Identifier | [Patent #, Date] | Residues | Region | Value |
| ABP61861 | Human polypeptide SEQ ID NO | 1 . . . 212 | 211/212 (99%) | e−126 |
| | 215 - Homo sapiens, 212 aa. | 1 . . . 212 | 211/212 (99%) | |
| | [US2002065394-A1, 30 MAY | | | |
| | 2002] | | | |
| AAM93517 | Human polypeptide, SEQ ID NO: | 1 . . . 212 | 211/212 (99%) | e−126 |
| | 3243 - Homo sapiens, 212 | 1 . . . 212 | 211/212 (99%) | |
| | aa. [EP1130094-A2, 05 SEP. | | | |
| | 2001] | | | |
| AAY94302 | Human corticosteroid | 1 . . . 212 | 211/212 (99%) | e−126 |
| | synthesis-associated | 1 . . . 212 | 211/212 (99%) | |
| | protein - Homo sapiens, 212 aa. | | | |
| | [WO200028027-A2, 18 MAY | | | |
| | 2000] | | | |
| AAW73630 | Human secreted protein clone | 1 . . . 212 | 211/212 (99%) | e−126 |
| | ej265_4 - Homo sapiens, 212 | 1 . . . 212 | 211/212 (99%) | |
| | aa. [WO9855614-A2, 10 DEC. | | | |
| | 1998] | | | |
| AAY12939 | Amino acid sequence of a | 1 . . . 212 | 172/212 (81%) | 5e−96 |
| | human secreted peptide - | 1 . . . 212 | 179/212 (84%) | |
| | Homo sapiens, 213 aa. | | | |
| | [WO9911293-A1, 11 MAR. 1999] | | | |

[0430] In a BLAST search of public sequence datbases, the NOV12a protein was found to have homology to the proteins shown in the BLASTP data in Table 12E.

TABLE 12E
Public BLASTP Results for NOV12a

| | | NOV12a | Identities/ | |
|---|---|---|---|---|
| Protein | | Residues/ | Similarities for | |
| Accession | | Match | the Matched | Expect |
| Number | Protein/Organism/Length | Residues | Portion | Value |
| Q9HBJ0 | PLAC1 (Placenta-specific 1) - | 1 . . . 212 | 211/212 (99%) | e−126 |
| | Homo sapiens (Human), 212 aa. | 1 . . . 212 | 211/212 (99%) | |
| Q9JI83 | EPCS26 (PLAC1) (Placental | 1 . . . 171 | 104/171 (60%) | 1e−60 |
| | specific protein 1) - Mus | 1 . . . 171 | 134/171 (77%) | |
| | musculus (Mouse), 173 aa. | | | |
| BAC04191 | CDNA FLJ36198 fis, clone | 9 . . . 125 | 38/118 (32%) | 7e−17 |
| | TESTI2028242, weakly similar | 5 . . . 122 | 70/118 (59%) | |
| | to Mus musculus EPCS26 mRNA - | | | |
| | Homo sapiens (Human), 158 aa. | | | |
| Q925U0 | Initiate factor 3 (Oocyte- | 7 . . . 122 | 34/117 (29%) | 6e−09 |
| | secreted protein 1 | 8 . . . 122 | 62/117 (52%) | |
| | precursor) - Mus musculus | | | |
| | (Mouse), 202 aa. | | | |
| BAC11848 | Initiate factor 3 2 - Mus | 7 . . . 88 | 25/83 (30%) | 3e−05 |
| | musculus (Mouse), 92 aa. | 8 . . . 89 | 46/83 (55%) | |

[0431] PFam analysis predicts that the NOV12a protein contains the domains shown in the Table 12F.

TABLE 12F
Domain Analysis of NOV12a

| | | | |
|---|---|---|---|
| | | Identities/ | |
| | | Similarities for | |
| Pfam | NOV12a Match | the Matched | Expect |
| Domain | Region | Region | Value |

No Significant Matches Found

### Example 13

[0432] The NOV13 clone was analyzed, and the nucleotide and encoded polypeptide sequences are shown in Table 13A.

TABLE 13A
NOV13 Sequence Analysis

| | |
|---|---|
| SEQ ID NO: 43 | 1103 bp |

| NOV13 a, | AAGCAGGCTGGTACGCCCTGGAGTTAANGGATGGCTGCGGGTTTGGCGGCGCTGCGCC | |
|---|---|---|
| CC157844-01 DNA | | |
| Sequence | GGCAGGCAGCGAGGCCGGGTCGGGCCCTGGGCCCTCGCGCCCCTCCCGCGAGGCCTGT | |
| | CATGCAGGGCCCCGCCGGGAACGCGAGCCGGGGACTGCCAGGCGGGCCGCCCTCCACA | |
| | GTCGCGTCCGGGGCGGGCCGCTGCGAGAGCGGCGCGCTCATGCACAGCTTCGGCATCT | |
| | TCCTGCACCGGCTGCTCGGCGTCGTGGCCTTCAGCACGTTAATGGTCAAACGCTTCAG | |
| | AGAACCAAAGCATGAAAGACGTCCGTGGAGGATATGGTTTTTAGACACTTCCAAACAA | |
| | GCCATAGGAATGCTGTTCATCCACTTTGCAAATGTATACCTAGCAGATCTCAGTGAAG | |
| | AGGACCCTTGTTCACTGTACCTCATCAACTTCCTCCTGGACGCCACTGTGGGCATGCT | |
| | GCTCATCTACGTGGGGGTGCGCGCCGTCAGCGTCCTGGTAGAGTGGCAGCAGTGGGAG | |
| | TCCCTGCGCTTCGGCGAATATGGAGACCCTCTGCAGTGTGGAGCCTGGGTCGGGCAGT | |
| | GCGCTCTTTACATCGTGATCATGATTTTTGAAAAGTCTGTCGTCTTCATCGTCCTCCT | |
| | CCTACTCCAGTGGAAAAAGGTGGCCCTATTGAATCCAATTGAAAACCCCGACCTGAAG | |
| | CAGGCCATCGTCATGCTGATCGTCCCCTTCTTTGTCAACGCTTTGATGTTTTGGGTAG | |
| | TGGACAATTTCCTCATGAGAAAGGGGAAGACGAAAGCTAAGCTAGAAGAAAGGGGAGC | |
| | CAACCAGGACTCGAGGAATGGGAGCAAGGTCCGCTACCGGAGGGCCGCATCCCACGAG | |
| | GAGTCTGAGTCTGAGATCCTGATCTCAGCGGATGATGAGATGGAGGAGTCCGACGTGG | |
| | AGGAGGACCTCCGCAGACTGACCCCCCTCAAGCCTGTGAAGAAAAAGAAGCACCGCTT | |
| | TGGGCTACCCGTATGACACATTCCCATGCTGGGGGTGACGGGACGGCCCCGCCAGCCG | |
| | CTGGTGTCCACAGGTCATCCCACAGCATCGTTCCTTACCCTCTCTCTGCCCTTCACCC | |
| | G | |
| | ORF Start: ATG at 31 | ORF Stop: TGA at 1000 |

| | | |
|---|---|---|
| SEQ ID NO: 44 | 323 aa | MW at 36089.9kD |

| | |
|---|---|
| NOV13a, | MAAGLAALRRQAARPGRALGPRAPPARPVMQGPAGNASRGLPGGPPSTVASGAGRCES |
| CG157844-01 | |
| Protein Sequence | GALMHSFGIFLQGLLGVVAFSTLMVKRFREPKHERRPWRIWFLDTSKQAIGMLFIHFA |
| | NVYLADLSEEDPCSLYLINFLLDATVGMLLIYVGVRAVSVLVEWQQWESLRFGEYGDP |
| | LQCGAWVGQCALYIVIMIFEKSVVFIVLLLLQWKKVALLNPIENPDLKLAIVMLIVPF |
| | FVNALMFWVVDNFLMRKGKTKAKLEERGANQDSRNGSKVRYRRAASHEESESEILISA |
| | DDEMEESDVEEDLRRLTPLKPVKKKKHRFGLPV |

[0433] Further analysis of the NOV13a protein yielded the following properties shown in Table 13B.

TABLE 13B
Protein Sequence Properties NOV13a

| | |
|---|---|
| PSort | 0.6113 probability located in mitochondrial |
| analysis: | inner membrane; 0.6000 probability located in |
| | plasma membrane; 0.4387 probability located in |
| | mitochondrial intermembrane space; |
| | 0.4000 probability located in Golgi body |
| SignalP | No Known Signal Sequence Predicted |
| analysis: | |

[0434] A search of the NOV13a protein against the Geneseq database, a proprietary database that contains sequences published in patents and patent publication, yielded several homologous proteins shown in Table 13C.

TABLE 13C
Geneseq Results for NOV13a

| | | NOV13a | Identities/ | |
|---|---|---|---|---|
| | | Residues/ | Similarities for | |
| Geneseq | Protein/Organism/Length | Match | the Matched | Expect |
| Identifier | [Patent #, Date] | Residues | Region | Value |
| AAB41574 | Human ORFX ORF1338 | 144 . . . 323 | 180/180 (100%) | e−100 |
| | polypeptide sequence SEQ ID | 1 . . . 180 | 180/180 (100%) | |
| | NO: 2676 - Homo sapiens, 180 | | | |
| | aa. [WO200058473-A2, 05 OCT. | | | |
| | 2000] | | | |
| ABG21481 | Novel human diagnostic | 233 . . . 306 | 52/74 (70%) | 3e−18 |
| | protein #21472 - Homo | 48 . . . 120 | 56/74 (75%) | |
| | sapiens, 507 aa. | | | |
| | [WO200175067-A2, 11 OCT. | | | |
| | 2001] | | | |
| AAG64212 | Murine HSP47 interacting | 11 . . . 53 | 23/52 (44%) | 0.21 |
| | protein, #2 - Mus sp, 255 | 65 . . . 115 | 27/52 (51%) | |
| | aa. [JP2001145493-A, 29 MAY | | | |
| | 2001] | | | |
| ABB53290 | Human polypeptide #30 - Homo | 11 . . . 53 | 23/52 (44%) | 0.27 |
| | sapiens, 255 aa. | 65 . . . 115 | 27/52 (51%) | |
| | [WO200181363-A1, 01 NOV. | | | |
| | 2001] | | | |
| ABG20114 | Novel human diagnostic | 7 . . . 61 | 22/55 (40%) | 0.35 |
| | protein #20105 - Homo | 441 . . . 494 | 26/55 (47%) | |
| | sapiens, 710 aa. | | | |
| | [WO200175067-A2, 11 OCT. | | | |
| | 2001] | | | |

[0435] In a BLAST search of public sequence datbases, the NOV13a protein was found to have homology to the proteins shown in the BLASTP data in Table 13D.

TABLE 13D
Public BLASTP Results for NOV13a

| | | NOV13a | Identities/ | |
|---|---|---|---|---|
| Protein | | Residues/ | Similarities for | |
| Accession | | Match | the Matched | Expect |
| Number | Protein/Organism/Length | Residues | Portion | Value |
| Q9D7D4 | 2310014H19Rik protein - Mus | 30 . . . 323 | 277/294 (94%) | e−157 |
| | musculus (Mouse), 288 aa. | 1 . . . 288 | 280/294 (95%) | |
| Q9D8S1 | 1810038N08Rik protein - Mus | 30 . . . 323 | 277/294 (94%) | e−157 |
| | musculus (Mouse), 288 aa. | 1 . . . 288 | 280/294 (95%) | |
| Q8R3UO | Similar to RIKEN cDNA | 144 . . . 323 | 170/180 (94%) | 5e−91 |
| | 1810038N08 gene - Mus | 1 . . . 174 | 171/180 (94%) | |
| | musculus (Mouse), 174 aa. | | | |
| T49501 | hypothetical protein | 19 . . . 302 | 87/354 (24%) | 3e−17 |
| | B14D6.530 [imported] - | 149 . . . 496 | 148/354 (41%) | |
| | Neurospora crassa, 556 aa. | | | |
| Q12042 | P2558 protein (ORF | 49 . . . 246 | 63/227 (27%) | 3e−16 |
| | YPL162C) - Saccharomyces | 3 . . . 224 | 111/227 (48%) | |
| | cerevisiae (Baker's yeast), | | | |
| | 273 aa. | | | |

[0436] PFam analysis predicts that the NOV13a protein contains the domains shown in the Table 13E.

TABLE 13E
Domain Analysis of NOV13a

| | | | |
|---|---|---|---|
| | | Identities/ | |
| | | Similarities for | |
| Pfam | NOV13a Match | the Matched | Expect |
| Domain | Region | Region | Value |

No Significant Matches Found

### Example 14

[0437] The NOV14 clone was analyzed, and the nucleotide and encoded polypeptide sequences are shown in Table 14A.

TABLE 14A
NOV14 Sequence Analysis

| | |
|---|---|
| SEQ ID NO: 45 | 1728 bp |

| NOV14a, | ATGGATCTGGTGCTAAAAAGATGCCTTCTTCATTTGGCTGTGATAGGTGCTTTGCTGG | |
|---|---|---|
| CG158114-01 DNA | | |
| Sequence | CTGTGGGGGCTACAAAAGGGAGCCAGGTGTGGGGAGGACAGCCAGTGTATCCCCAGGA | |
| | AACTGACGATGCCTGCATCTTCCCTGATGGTGGACCTTGCCCATCTGGCTCTTGGTCT | |
| | CAGAAGAGAAGCTTTGTTTATGTCTGOAAGACCTGGGGCCAATACTGGCAGGTTCTAG | |
| | GGGGCCCAGTGTCTGGGCTGAGCATTGGGACAGGCAGGGCAATGCTGGGCACACACAC | |
| | CATGGAAGTGACTGTCTACCATCGCCCGGGATCCCGGAGCTATGTGCCTCTTGCTCAT | |
| | TCCAGCTCAGCCTTCACCATTACTGACCAGGTGCCTTTCTCCGTGAGCGTGTCCCAGT | |
| | TGCGGGCCTTGGATGGAGGGAACAAGCACTTCCTGAGAAATCAGCCTCTGACCTTTGC | |
| | CCTCCAGCTCCATGACCCCAGTGGCTATCTGGCTGAAGCTGACCTCTCCTACACCTGG | |
| | GACTTTGGAGACAGTAGTGGAACCCTGATCTCTCGGGCACTTGTGGTCACTCATACTT | |
| | ACCTGGAGCCTGGCCCAGTCACTGCCCAGGTGGTCCTGCAGGCTGCCATTCCTCTCAC | |
| | CTCCTGTGGCTCCTCCCCAGTTCCAGGCACCACAGATGGGCACAGGCCAACTGCAGAG | |
| | GCCCCTAACACCACAGCTGGCCAAGTGCCTACTACAGAAGTTGTGGGTACTACACCTG | |
| | GTCAGGCGCCAACTGCAGAGCCCTCTCGAACCACATCTGTGCAGGTGCCAACCACTGA | |
| | AGTCATAAGCACTGCACCTGTGCAGATGCCAACTGCAGAGAGCACAGGTATGACACCT | |
| | GAGAAGGTGCCAGTTTCAGAGGTCATGGGTACCACACTGGCAGAGATGTCAACTCCAG | |
| | AGGCTACAGGTATGACACCTGCAGAGGTATCAATTGTGGTGCTTTCTGGAGCCACAGC | |
| | TGCACAGGTAACAACTACAGAGTCGGTGGAGACCACAGCTAGAGAGCTACCTATCCCT | |
| | GAGCCTGAAGGTCCAGATGCCAGCTCAATCATGTCTACGGAAAGTATTACAGGTTCCC | |
| | TGGGCCCCCTGCTGGATGGTACAGCCACCTTAAGGCTGGTGAACAGACAAGTCCCCCT | |
| | GGATTGTGTTCTGTATCGATATGGTTCCTTTTCCGTCACCCTGGACATTGTCCAGGGT | |
| | ATTGAAAGTGCCGAGATCCTGCAGGCTGTGCCGTCCGGTGAGGGGGATGCATTTGAGC | |
| | TGACTGTGTCCTGCCAAGGCGGGCTGCCCAAGGAAGCCTGCATGGAGATCTCATCGCC | |
| | AGGGTGCCAGCCCCCTGCCCAGCGGCTGTGCCAGCCTGTGCTACCCAGCCCAGCCTGC | |
| | CAGCTGGTTCTGCACCAGATACTGAAGGGTGGCTCGGGGACATACTGCCTCGTCGTGT | |
| | CTCTGGCTGATACCAACAGCCTGGCAGTGGTCAGCACCCAGCTTATCATGCCTGGTCA | |
| | ACAAGCAGGCCTTGGGCAGGTTCCGCTGATCGTGGGCATCTCGCTGGTGTTGATGGCT | |
| | GTGGTCCTTGCATCTCTGATATATAGGCGCAGACTTATCAAGCTAGACTTCTCCGTAC | |
| | CCCAGTTGCCACATAGCAGCAGTCACTGGCTGCGTCTACCCCCCATCTTCTGCTCTTG | |
| | TCCCATTGGTGAGAATAGCCCCCTCCTCAGTGGGCAGCAGGTCTGA | |
| | ORF Start: ATG at 1 | ORF Stop: TGA at 1726 |

| | | |
|---|---|---|
| SEQ ID NO: 46 | 575 aa | MW at 60580.6kD |

| | |
|---|---|
| NOV14a, | MDLVLKRCLLHLAVIGALLAVGATKGSQVWGGQPVYPQETDDACIFPDGGPCPSGSWS |
| CG158114 -01 | |
| Protein Sequence | QKRSFVYVWKTWGQYWQVLGGPVSGLSIGTGRAVTGTHTMEVTVYHRRGSRSYVPLAH |
| | SSSAFTITDQVPFSVSVSQLRALDGGNKHFLRNQPLTFALQLHDPSGYLAEADLSYTW |
| | DFGDSSGTLISRALVVTHTYLEPGPVTAQVVLQAAIPLTSCGSSPVPGTTDGHRPTAE |
| | APNTTAGQVPTTEVVGTTPGQAPTAEPSGTTSVQVPTTEVISTAPVQMPTAESTGMTP |
| | EKVPVSEVMGTTLAEMSTPEATGMTPAEVSIVVLSGTTHQVTTTEWVETTARELPIGP |
| | EPEGPDASSIMSTESITGSLGPLLDGTATLRLVKRQVPLDCVLYRYGSFSVTLDIVQG |
| | IESAEILQAVPSGEGDAFELTVSCQGGLPKEACMEISSPGCQPPAQRLCQPVLPSPAC |
| | QLVLHIQILKGGSGTYCLNVSLADTNSLAVVSTQLIMPGQEAGLGQVPLIVGLLVLMA |
| | VVLASLIYRRRLMKQDFSVPQLPHSSSHWLRLPRIFCSCPIGENSPLLSGQQV |

[0438] Further analysis of the NOV14a protein yielded the following properties shown in Table 14B.

TABLE 14B
Protein Sequence Properties NOV14a

| | |
|---|---|
| PSort | 0.4600 probability located in plasma membrane; |
| analysis: | 0.1000 probability located in endoplasmic |
| | reticulum (membrane); 0.1000 probability located |
| | in endoplasmic reticulum (lumen); |
| | 0.1000 probability located in outside |
| SignalP | Cleavage site between residues 27 and 28 |
| analysis: | |

[0439] A search of the NOV14a protein against the Geneseq database, a proprietary database that contains sequences published in patents and patent publication, yielded several homologous proteins shown in Table 14C.

TABLE 14C
Geneseq Results for NOV14a

| | | NOV14a | Identities/ | |
|---|---|---|---|---|
| | | Residues/ | Similarities | |
| Geneseq | Protein/Organism/Length | Match | for the Matched | Expect |
| Identifier | [Patent #, Date] | Residues | Region | Value |
| AAU09695 | Human melanoma antigen | 26 . . . 575 | 550/550 (100%) | 0.0 |
| | gp100 - Homo sapiens, 661 | 112 . . . 661 | 550/550 (100%) | |
| | aa. [WO200192294-A2, 06 | | | |
| | DEC. 2001] | | | |
| AAU84803 | Human gp100 consensus | 26 . . . 575 | 550/550 (100%) | 0.0 |
| | sequence - Homo sapiens, | 112 . . . 661 | 550/550 (100%) | |
| | 29 NOV. 2001] | | | |
| AAU29003 | Melanoma antigen cDNA25 - | 26 . . . 575 | 550/550 (100%) | 0.0 |
| | Synthetic, 661 aa. | 112 . . . 661 | 550/550 (100%) | |
| | [US6270778-B1, 07 | | | |
| | AUG. 2001] | | | |
| AAB47540 | Human melanoma antigen | 26 . . . 575 | 550/550 (100%) | 0.0 |
| | gp100 - Homo sapiens, 661 | 112 . . . 661 | 550/550 (100%) | |
| | aa. [WO200170767-A2, 27 | | | |
| | SEP. 2001] | | | |
| AAY31977 | Human melanoma antigen | 26 . . . 575 | 550/550 (100%) | 0.0 |
| | gp100 - Homo sapiens, 661 | 112 . . . 661 | 550/550 (100%) | |
| | aa. [WO9947102-A2, 23 | | | |
| | SEP. 1999] | | | |

[0440] In a BLAST search of public sequence datbases, the NOV14a protein was found to have homology to the proteins shown in the BLASTP data in Table 14D.

TABLE 14D
Public BLASTP Results for NOV14a

| | | NOV14a | Identities/ | |
|---|---|---|---|---|
| Protein | | Residues/ | Similarities for | |
| Accession | | Match | the Matched | Expect |
| Number | Protein/Organism/Length | Residues | Portion | Value |
| P40967 | Melanocyte protein Pmel 17 | 26 . . . 575 | 550/550 (100%) | 0.0 |
| | precursor (Melanocyte lineage- | 112 . . . 661 | 550/550 (100%) | |
| | specific antigen GP100) | | | |
| | (Melanoma-associated ME20 | | | |
| | antigen) (ME20M/ME20S) (ME20- | | | |
| | M/ME20-S) (95 kDa melanocyte- | | | |
| | specific secreted | | | |
| | glycoprotein) - Homo sapiens | | | |
| | (Human), 661 aa. | | | |
| CAC38954 | Sequence 109 from Patent | 26 . . . 575 | 548/550 (99%) | 0.0 |
| | WO0130382 - synthetic | 112 . . . 661 | 548/550 (99%) | |
| | construct, 661 aa. | | | |
| I38400 | melanoma-associated ME20 | 26 . . . 575 | 550/551 (99%) | 0.0 |
| | antigen (me20m) - human, 662 | 112 . . . 662 | 550/551 (99%) | |
| | aa. | | | |
| A41234 | melanocyte-specific protein | 26 . . . 575 | 549/557 (98%) | 0.0 |
| | Pmel-17 precursor - human, 668 | 112 . . . 668 | 549/557 (98%) | |
| | aa. | | | |
| Q9CZB2 | N/A - Mus musculus (Mouse), | 26 . . . 575 | 415/550 (75%) | 0.0 |
| | 626 aa. | 111 . . . 626 | 448/550 (81%) | |

[0441] PFam analysis predicts that the NOV14a protein contains the domains shown in the Table 14E.

TABLE 14E
Domain Analysis of NOV14a

| | | Identities/ | |
|---|---|---|---|
| | | Similarities for | |
| Pfam | NOV14a Match | the Matched | Expect |
| Domain | Region | Region | Value |
| PKD | 131 . . . 215 | 26/99 (26%) | 5.6e−08 |
| | | 61/99 (62%) | |

### Example 15

[0442] The NOV15 clone was analyzed, and the nucleotide and encoded polypeptide sequences are shown in Table 15A.

TABLE 15A
NOV15 Sequence Analysis

| | |
|---|---|
| SEQ ID NO: 47 | 1733 bp |

| NOV15a, | CTCGAGCTGCAGAGCTAGCTCTGCAGCTCGCTGCAGAGCTCAGCTGCGTCCGGCGGAG | |
|---|---|---|
| CG158553-01 DNA | | |
| Sequence | GCAGCTGCTGACCCAGCTGTGGACTGTGCCGGGGGCGGGGGACGGAGGGGCAGGAGCC | |
| | CTGGGCTCCCCGTGGCGGGGGCTGTATCATGGACCACCTCGGGGCGTCCCTCTGGCCC | |
| | CAGGTCGCCTCCCTTTGTCTCCTGCTCGCTGGGGCCGCCTGGGCGCCCCCGCCTAACC | |
| | TCCCGGACCCCAAGTTCGAGAGCAAAGCGGCCTTGCTGGCGGCCCGGGGGCCCGAAGA | |
| | GCTTCTGTGCTTCACCGAGCGGTTGGAGGACTTGGTGTGTTTCTGGGAGGAAGCGGCG | |
| | AGCGCTGGGGTGGGCCCGGGCAACTACAGCTTCTCCTACCAGCTCGAGGATGAGCCAT | |
| | GGAAGCTGTGTCGCCTGCACCAGGCTCCCACGGCTCGTGGTGCGGTGCGCTTCTGGTG | |
| | TTCGCTGCCTACACCCGACACGTCGAGCTTCGTGCCCCTAGAGTTGCGCGTCACAGCA | |
| | GCCTCCGGCGCTCCGCGATATCACCGTGTCATCCACATCAATGAAGTAGTGCTCCTAG | |
| | ACGCCCCCGTGGGGCTGGTGGCGCGGTTCGCTGACGAGAGCGGCCACGTAGTGTTGCG | |
| | CTGGCTCCCGCCGCCTGACACACCCATGACGTCTCACATCCGCTACGAGGTGGACGTC | |
| | TCGGCCGGCAACGGCGCAGGGAGCGTACAGAGGGTCGAGATCCTGGAGGGCCGCACCG | |
| | AGTGTGTGCTGAGCAACCTGCGGGGCCGGACGCGCTACACCTTCGCCGTCCGCGCGCG | |
| | TATGGCTGAGCCGAGCTTCGGCGGCTTCTGGAGCGCCTGGTCGGAGCCTGTGTCGCTG | |
| | CTGACGCCTAGCGACCTGGACCCCCTCATCCTGACGCTCTCCCTCATCCTCGTGGTCA | |
| | TCCTGGTGCTGCTGACCGTGCTCGCGCTGCTCTCCCACCGCCGGGCTCTGAAGCAGAA | |
| | GATCTGGCCTGGCATCCCGAGCCCAGAGAGCGAGTTTGAAGGCCTCTTCACCACCCAC | |
| | AAGGGTAACTTCCAGCTGTGGCTGTACCAGAATGATGGCTGCCTGTGGTGGAGCGCCT | |
| | GCACCCCCTTCACCGAGGACCCACCTGCTTTCCTGGAAGTCCTCTCAGAGCGCTGCTG | |
| | GGGGACGATGCAGGCAGTGGAGCCGGGOACAGATGATGAGCGCCCCCTGCTGGAGCCA | |
| | GTGGGCAGTGAGCATGCCCAGGATACCTATCTGGTGCTGGACAAATGGTTGCTGCCCC | |
| | GGAACCCGCCCAGTGAGGACCTCCCAGGGCCATGGGCACTGTGCCCTGAGcTGCcCCC | |
| | TACCCCACCCCACCTAAAGTACCTGTACCTTGTGGTATCTGACTCTGGCATCTCAACT | |
| | GACTACAGCTCAGGGGACTCCCAGGGAGCCCAAGGGGGCTTATCCGATGCCCCCTACT | |
| | CCAGCCCTTATGAGAACAGCCCTATCCCAGCCGCTGAGCCTCTGCCCCCCAGCTATGT | |
| | GGCTTGCTCTTAGGACACCAGGCTGCAGATGATCAGGGATCCAATATGACTCAGAGAA | |
| | CCAGTGCAGACTCAAGACTTATGGAACAGGGATGGCGAGGCCTCTCTCAGGAGCAGGG | |
| | GCATTGCTGATTTTGTCTGCCCAATCCATCCTGCTCAGGAAACCACAACCTTGCAGTA | |
| | TTTTTAAATATGTATAGTTTTTTTGCTGCAGAGCTAGCTCTGCAGCTCGAG | |
| | ORF Start: ATG at 145 | ORF Stop: TAG at 1519 |

| | | |
|---|---|---|
| SEQ ID NO: 48 | 458 aa | MW at 50069.3kD |

| NOV15 a, | MDHLGASLWPQVGSLCLLLAGAAWAPPPNLPDPKFESKAALLASGPEELLCFTRERLE | |
|---|---|---|
| CG158553-01 | | |
| Protein Sequence | DLVCFWEEAASAGVGPGNYSFSYQLEDEPWKLCRLHQAPTFEGAVRFWCSLPTADTSS | |
| | FVPLELRVTSGSGAPRYHRVIHINEVVLLDAPVGLVARLADESGHRALRWLPPPETPM | |
| | TSHIRYEVDVSAGNGAGSVQRVEILEGRTECVLSNLRGRTRYTFAVRARMAEPSFGGF | |
| | WSAWSEPVSLLTPSDLDPLILTLSLILVVILVLLTVLALLSHRPSAKQKIWPGIPSPE | |
| | SEFEGLFTTHKGNFQLWLYQNDGCLWWSACTPFTEDPPAFLEVLSERCWGTMQAVEPG | |
| | TDDEGPLLEPVGSEHAQDTYLVLDKWLLPRNPPSEDLPGPWALCPELPPTPPHLKYLY | |
| | LVVSDSGISTDYSSGDSQGAQGGLSDGPYSSPYENSPIPAAEPLPPSYVACS | |
| | SEQ ID NO: 49 | 1733 bp |

| NOV15b, | CTCGAGCTGCAGAGCTAGCTCTGCAGCTCGCTGCAGAGCTCAGCTGCGTCCGGCGGAG | |
|---|---|---|
| CG158553-01 DNA | | |
| Sequence | GCAGCTGCTGACCCAGCTGTGGACTGTGCCGGGGGCGGGGGACGGAGGGGCAGGAGCC | |
| | CTGGGCTCCCCGTGGCGGGGGCTGTATCATGGACCACCTCGGGGCGTCCCTCTGGCCC | |
| | CAGGTCGGCTCCCTTTGTCTCCTGCTCGCTGGGGCCGCCTGGGCGCCCCCGCCTGACC | |
| | TCCCGGACCCCAAGTTCGAGAGCAAAGCGGCCTTGCTGGCGGCCCGGGGGCCCGAAGA | |
| | GCTTCTGTGCTTCACCGAGCGGTTGGAGGACTTGGTGTGTTTCTGGGAGGAGGCGGCG | |
| | AGCGCTGGGGTGGGCCCGGGCAACTACAGCTTCTCCTACCAGCTCGAGGATGAGCCAT | |
| | GGAAGCTGTGTCGCCTCCACCAGGCTCCCACGGCTCGTGGTGCGGTGCGCTTCTGGTG | |
| | TTCGCTGCCTACAGCCGACACGTCGAGCTTCGTGCCCCTAGAGTTGCGCGTCACAGCA | |
| | GCCTCCGGCGCTCCGCGATATCACCGTGTCATCCACATCAATGAAGTAGTGCTCCTAG | |
| | ACGCCCCCGTGGGGCTGGTGGCGCGGTTGGCTGACGAGAGCGGCCACGTAGTGTTGCG | |
| | CTGGCTCCCGCCGCCTGAGACACCCATGACGTCTCACATCCGCTACGAGGTGGACGTC | |
| | TCGGCCGGCAACGGCGCAGGGAGCGTACAGAGGGTGGAGATCCTGGAGGGCCGCACCG | |
| | AGTGTGTGCTGAGCAACCTGCGGGGCCGGACGCCCTACACCTTCGCCGTCCGCGCGCG | |
| | TATGGCTGAGCCGAGCTTCGGCGGCTTCTGGAGCGCCTGGTCGGAGCCTGTGTCGCTG | |
| | CTGACGCCTAGCGACCTGGACCCCCTCATCCTGACGCTCTCCCTCATCCTCGTGGTCA | |
| | TCCTGGTGCTGCTGACCGTGCTCGCGCTGCTCTCCCACCGCCGGGCTCTGACGCAGAC | |
| | GATCTGGCCTGGCATCCCGAGCCCAGAGAGCGAGTTTGAAGGCCTCTTCACCACCCAC | |
| | AAGGGTAACTTCCAGCTGTGGCTGTACCAGAATGATGGCTGCCTGTGGTGGAGCGCCT | |
| | GCACCCCCTTCACGGAGGACCCACCTGCTTTCCTGGAAGTCCTCTCAGAGCGCTGCTG | |
| | GGGGACGATGCAGGCAGTGGAGCCGGGGACAGATGATGAGGGCCCCCTGCTGGAGCCA | |
| | GTGGGCAGTGAGCATGCCCAGGATACCTATCTGGTGCTGGACAAATGGTTGCTGCCCC | |
| | GGAACCCGCCCAGTGAGGACCTCCCAGGGCCATGGGCACTGTGCCCTGAGCTGCCCCC | |
| | TACCCCACCCCACCTAAAGTACCTGTACCTTGTGGTATCTGACTCTGGCATCTCGACT | |
| | GACTACAGCTCAGGGGACTCCCAGGGAGCCCAAGGGGGCTTATCCGATGGCCCCTACT | |
| | CCAGCCCTTATGAGAACAGCCCTATCCCAGCCGCTGAGCCTCTGCCCCCCAGCTATGT | |
| | GGCTTGCTCTTAGGACACCAGGCTGCAGATGATCAGGGATCCAATATGACTCAGAGAT | |
| | CCAGTGCAGACTCAAGACTTATGGAACAGGGATGGCGAGGCCTCTCTCAGGAGCAGGG | |
| | GCATTGCTGATTTTGTCTGCCCAATCCATCCTGCTCAGGAAACCACAACCTTGCAGTA | |
| | TTTTTAAATATGTATAGTTTTTTTGCTGCAGAGCTAGCTCTGCAGCTCGAG | |
| | ORF Start: ATG at 145 | ORF Stop: TAG at 1519 |

| | | |
|---|---|---|
| SEQ ID NO: 50 | 458 aa | MW at 50069.3kD |

| NOV15b, | MDHLGASLWPQVGSLCLLLAGAAWAPPPNLPDPKFESKAALLAGTGPEELLCFTERLE | |
|---|---|---|
| CG158553-01 | | |
| Protein Sequence | DLVCFWEEAASAGVGPGNYSFSYQLEDEPWKLCRLHQAPTARGAVRFWCSLPTADTSS | |
| | FVPLELRVTAASGAPRYHRVIHINEVVLLDAPVGLVARLADESGHNRLRWLPPPETPM | |
| | TSHRYEVDVSAGNGAGSVQRVEILEGRTECVLSNLRGRTRYTFAVRARMAEPSRFGGF | |
| | WSAWSEPVSLLTPSDLDPLILTLSLILVVILVLLTVLALLSHRRALKQKIWPGIPSPE | |
| | SEFEGLFTTHKGNFQLWLYQNDGCLWWSACTPFTEDPPAFLEVLSERCWGTMQAVEPG | |
| | TDDEGPLLEPVGSEHAQDTYLVLDKWLLPRNPPSEDLPGPWALCPELPPTPPHLKYLY | |
| | LVVSDSGISTDYSSGDSQGAQGGLSDGPYSSPYENSPIPAAEPLPPSYVACS | |
| | SEQ ID NO: 51 | 1435 bp |

| NOV15c, | GGGGCTGTATCATGGACCACCTCGGGGCGTCCCTCTGGCCCCAGGTCGGCTCCCTTTG | |
|---|---|---|
| CG158553-02 DNA | | |
| Sequence | TCTCCTGCTCGCTGGGGCCGCCTGGGCGCCCCCGCCTAACCTCCCGGACCCCTAGTTC | |
| | GAGAGCAAAGCGGCCTTGCTGGCGGCCCGGGGGCCCGAAGAGCTTCTGTGCTTCACCG | |
| | ACCGGTTGGGGCACTTGGTGTGTTTCTGGGAGGAAGCGGCGAGCGCTGGGGTGGGCCC | |
| | GGGCAACTACAGCTTCTCCTACCAGCTCGAGGATGAGCCATGGCTGCTGTGTCGCCTG | |
| | CACCAGGCTCCCACGGCTCGTGGTCCGGTGCGCTTCTGGTGCTCGCTGCCTACACCCG | |
| | ACACGTCGAGCTTCGTGCCCCTAGAGTTGCGCGTCACAGCAGCCTCCGGCGCTCCGCG | |
| | ATATCACCGTGTCATCCACATCAATGAAGTAGTGCTTCTAGACGCCCCCGTGGGGCTG | |
| | GTGGCGCGGTTGGCTGACGAGAGCGGCCACGTAGTGTTGCGCTGGCTCCCGCCGCCTG | |
| | AGACACCCATGACGTCCCACATCCGCTACGAGGTGGACGTCTCGGCCGGCGTCGGCGC | |
| | AGGGAGCGTACAGAGGGTGGAGATCCTGGAGGGCCGCACCGAGTGTGTGCTGAGCTAC | |
| | CTGCGGGGCCGGACGCGCTACACCTTCGCCGTCCGCACGCGTATGGCTGAGCCGAGCT | |
| | TCGGCGGCTTCTGGAGCGCCTGGTCGGAGCCTGTGTCGCTGCTGACGCCTAGCGACCT | |
| | GGACCCCCTCATCCTGACGCTCTCCCTCATCCTCGTGGTCATCCTGGTGCTGCTGACC | |
| | GTGCTCGCGCTGCTCTCCCACCGCCGGGCTCTGAAGCAGAAGATCTGGCCTGGCATCC | |
| | CGAGCCCAGAGAGCGAGTTTGAAGGCCTCTTCACCACCCACAAGGGTATCTTCCAGCT | |
| | GTGGCTGTACCAGAATGATGGCTGCCTGTGGTGGACCCCCTGCACCCCCTTCACGGAG | |
| | GACCCACCTGCTTCCCTGGAAGTCCTCTCAGAGCGCTGCTGGGGGACGATGCAGGCAG | |
| | TGGAGCCGGGGACAGATGATGAGGGCCCCCTGCTGGAGCCAGTGGGCAGTGAGCATGC | |
| | CCAGGATACCTATCTGGTGCTGGACAAATGGTTGCTGCCCCGGAACCCGCCCAGTGAG | |
| | GACCTCCCAGGGCCATGGGCACTGTGCCCTGAGCTGCCCCCTACCCCACCCCACCTCG | |
| | AGTACCTGTACCTTGTGGTATCTGACTCTGGCATCTCAACTGACTACAGCTCAGGGGA | |
| | CTCCCAGGGAGCCCAAGGGGGCTTATCCGATGGCCCCTACTCCAGCCCTTATGAGTAC | |
| | AGCCCTATCCCAGCCGCTGAGCCTCTGCCCCCCAGCTATGTGGCTTGCTCTTAGGACA | |
| | CCAGGCTOCAGATGATCAGGGATCCAATATGACTCAGAGAACC | |
| | ORF Start: ATG at 12 | ORF Stop: TAG at 1386 |

| | | |
|---|---|---|
| SEQ ID NO: 52 | 458 aa | MW at 49993.2kD |

| NOV15a, | MDHLGASLWPQVGSLCLLLAGAAWAPPPNLPDPKFESKAALLAARGPEELLCFTERLG | |
|---|---|---|
| CG158553-02 | | |
| Protein Sequence | DLVCFWEEAASAGVGPGNYSFSYQLEDEPWKLCRLHQAPTARGAVRFWCSLPTADTSS | |
| | FVPLELRVTAASGAPRYHRVIHINEVVLLDAPVGLVARLADESGHVVLRWLPPPETPM | |
| | TSHIRYEVDVSAGNGAGSVQRVEILEGRTECVLSNLRGRTRYTFAVRTRMAEPSFGGF | |
| | WSAWSEPVSLLTPSDLDPLILTLSLILVVILVLLTVLALLSHRRALKQKTWPGIPSPE | |
| | SEFEGLFTTHKGNFQLWLYQNDGCLWWSPCTPFTEDPPASLEVLSERCWGTMQAVEPG | |
| | TDDEGPLLEPVGSEHAQDTYLVLDKWLLPRNPPSEDLPGPWALCPELPPTPPHLKYLY | |
| | LVVSDSGISTDYSSGDSQGAQGGLSDGPYSSPYENSPIPAAEPLPPSYVACS | |
| | SEQ ID NO: 53 | 1585 bp |

| NOV15d, | GGGGCTGTATCATGGACCACCTCGGGGCGTCCCTCTGGCCCCAGGTCGGCTCCCTTTG | |
|---|---|---|
| CG158553-03 DNA | | |
| Sequence | TCTCCTGCCCGCTGGGGCCGCCTGGGCGCCCCCGCCTAACCTCCCGGACCCCAAGTTC | |
| | GAGAGCAAAGCGGCCTTOCTGGCGGCCCGGGGGCCCGAAGAGCTTCTGTGCTTCACCG | |
| | AGCGGTTGGAGGACTTGGTGTGTTTCTGGGAGGAAGCGGCGAGCGCTGGGGTGGGCCC | |
| | GGGCAACTACAGCTTCTCCTACCAGCTCGAGGATGAGCCATGGAAGCTGTGTCGCCTG | |
| | CACCAGGCTCCCACGGCTCGTGGTGCGGTGCGCTTCTGGTGTTCGCTGCCTACAGCCG | |
| | ACACGTCGAGCTTCGTGCCCCTAGAGTTGCGCGTCACAGCAGCCTCCGGCGCTCCGCG | |
| | ATATCACCGTGTCATCCACATCAATGAAGTAGTGCTCCTAGACGCCCCCGTGGGGCTG | |
| | GTGCCGCGGTTGGCTGACGAGAGCGGCCACGTAGTGTTGCGCTGGCTCCCCCCGCCTG | |
| | AGACACCCATGACGTCTCACATCCGCTACGCGGTGGACGTCTCGGCCGGCGACGGCGC | |
| | AGGGAGCGTACAGAGGGTGAAGATCCTGGAGGGCCGCACCGAGTGTGTGCTGAGCGTC | |
| | CTGCGGGGCCGGACGCGCTACACCTTCGCCGTCCGCGCGCGTATGGCTGAGCCGAGCT | |
| | TCGGCGGCTTCTGGAGCGCCTGGTCGGAGCCTGTGTCGCTCCTGACGCCTAGCGACCT | |
| | GGACCCCCTCATCCTGACGCTCTCCCTCATCCTCGTGGTCATCCTGGTGCTGCTGACC | |
| | GTGCTCGCGCTGCTCTCCCACCGCCGGGCTCTGAAGCAGAAGATCTGGCCTGGCATCC | |
| | CGAGCCCAGAGAGCGAGTTTGAAGGCCTCTTCACCACCCACAAGGGTAACTTCCAGCT | |
| | GTGGCTGTACCAGAATGATGGCTGCCTGTGGTGGAGCCCCTGCACCCCCTTCACGGAG | |
| | GACCCACCTGCTTCCCTGGAAGTCCTCTCAGAGCGCTGCTGGGGGACGATGCAGGCAG | |
| | TGGAGCCGGGGACAGATGATGAGGGCCCCCTGCTGGAGCCAGTGGGCAGTCAGCATGC | |
| | CCAGGATACCTATCTGGTGCTGGACAAATGGTTGCTGCCCCGGAACCCGCCCAGTGAG | |
| | GACCTCCCAGGGCCTGGTGOCAGTGTGGACATAGTGGCCATGGATGAAGGCTCAGTAG | |
| | CATCCTCCTGCTCATCTGCTTTGGCCTCGAAGCCCAGCCCAGAGGGAGCCTCTCCTGC | |
| | CAGCTTTGAGTACACTATCCTGGACCCCAGCCCCCAGCTCTTGCGTCCATGGACACTG | |
| | TGCCCTGAGCTGCCCCCTACCCCACCCCACCTAAAGTACCTGTACCTTGTGGTATCTG | |
| | ACTCTGGCATCTCAACTGACTACAGCTCAGGGGACTCCCAGGGAGCCCTCGGGGGCTT | |
| | ATCCGATGGCCCCTACTCCAACCCTTATGAGAACAGCCTTATCCCAGCCGCTGAGCCT | |
| | CTGCCCCCCAGCTATGTGGCTTGCTCTTAGGACACCAGGCTGCAGATGATCAGGGATC | |
| | CAATATGACTCAGAGAACC | |
| | ORF Start: ATG at 12 | ORF Stop: TAG at 1536 |

| | | |
|---|---|---|
| SEQ ID NO: 54 | 508 aa | MW at 54999.6kD |

| | |
|---|---|
| NOV15d, | MDHLGASLWPQVGSLCLLPAGAAWAPPPNLPDPKFESKAALLAARGPEELLCFTERLE |
| CG158553-03 | |
| Protein Sequence | DLVCFWEEAASAGVGPGNYSFSYQLEDEPWKLCRLHQAPTARGAGREFWCSLPTADTS |
| | FVPLELRVTAHASGAPRYHRVIHINEVVLLDAPVGLVKARLADESGHLRWLPPPETPM |
| | TSHTRYAVDVSAGNGAGSVQRVKILEGRTECVLSNLRGRTRYTFAVRARMAEPSFGGF |
| | WSAWSEPVSLLTPSDLDPLILTLSLILVVILVLLTVLALLSHRPALKQKIWPGIPSPE |
| | SEFEGLFTTHKGNFQLWLYQNDGCLWWSPCTPFTEDPPASLEVLSERCWGTMQAVEPG |
| | TDDEOPLLEPVGSEHAQDTYLVLDKWLLPRNPPSEDLPGPGGSVDIVIDEGSKEASSC |
| | SSALASKPSPEGASAASFEYTILDPSPQLLRPWTLCPELPPTPKPHLKYLYLTSDSGI |
| | STDYSSGDSQGAQGGLSDGPYSNPYENSLTPAAEPLPPSYVACS |

[0443] Sequence comparison of the above protein sequences yields the following sequence relationships shown in Table 15B.

TABLE 15B
Comparison of NOV15a against NOV15b through NOV15d.

| | | Identities/ |
|---|---|---|
| | | Similarities for |
| Protein | NOV15a Residues/ | the Matched |
| Sequence | Match Residues | Region |
| NOV15b | 1 . . . 458 | 458/458 (100%) |
| | 1 . . . 458 | 458/458 (100%) |
| NOV15c | 1 . . . 458 | 454/458 (99%) |
| | 1 . . . 458 | 454/458 (99%) |
| NOV15d | 1 . . . 458 | 450/508 (88%) |
| | 1 . . . 508 | 452/508 (88%) |

[0444] Further analysis of the NOV15a protein yielded the following properties shown in Table 15C.

TABLE 15C
Protein Sequence Properties NOV15a

| | |
|---|---|
| PSort | 0.4600 probability located in plasma membrane; |
| analysis: | 0.1762 probability located in microbody |
| | (peroxisome); 0.1000 probability located in |
| | endoplasmic reticulum (membrane); 0.1000 |
| | probability located in endoplasmic reticulum (lumen) |
| SignalP | Cleavage site between residues 26 and 27 |
| analysis: | |

[0445] A search of the NOV15a protein against the Geneseq database, a proprietary database that contains sequences published in patents and patent publication, yielded several homologous proteins shown in Table 15D.

TABLE 15D
Geneseq Results for NOV15a

| | | NOV15a | Identities/ | |
|---|---|---|---|---|
| | | Residues/ | Similarities | |
| Geneseq | Protein/Organism/Length | Match | for the | Expect |
| Identifier | [Patent #, Date] | Residues | Hatched Region | Value |
| AAR69503 | Human erythropoietin | 1 . . . 458 | 453/508 (89%) | 0.0 |
| | receptor - Homo sapiens, 508 | 1 . . . 508 | 454/508 (89%) | |
| | aa. [US5378808-A, 03 JAN. | | | |
| | 1995] | | | |
| AAR70032 | Human erythropoietin | 1 . . . 458 | 453/508 (89%) | 0.0 |
| | receptor - Homo sapiens, 508 | 1 . . . 508 | 454/508 (89%) | |
| | aa. [WO9505469-A, 23 FEB. | | | |
| | 1995] | | | |
| AAR06512 | EPO receptor - Homo sapiens, | 1 . . . 458 | 453/508 (89%) | 0.0 |
| | 508 aa. [WO9008822-A, 09 | 1 . . . 508 | 454/508 (89%) | |
| | AUG. 1990] | | | |
| ABB09173 | Human erythropoietin | 1 . . . 458 | 452/508 (88%) | 0.0 |
| | receptor SEQ ID NO:5 - Homo | 1 . . . 508 | 453/508 (88%) | |
| | sapiens, 508 aa. | | | |
| | [US2002031806-A1, 14 MAR. | | | |
| | 2002] | | | |
| AAY44622 | Truncated human EpoR (t439) - | 1 . . . 388 | 386/388 (99%) | 0.0 |
| | Homo sapiens, 438 aa. | 1 . . . 388 | 386/388 (99%) | |
| | [W09967360-A2, 29 DEC. | | | |
| | 1999] | | | |

[0446] In a BLAST search of public sequence datbases, the NOV 15a protein was found to have homology to the proteins shown in the BLASTP data in Table 15E.

TABLE 15E
Public BLASTP Results for NOV15a

| | | NOV15a | Identities/ | |
|---|---|---|---|---|
| Protein | | Residues/ | Similarities | |
| Accession | | Match | for the Matched | Expect |
| Number | Protein/Organism/Length | Residues | Portion | Value |
| P19235 | Erythropoietin receptor | 1 . . . 458 | 453/508 (89%) | 0.0 |
| | precursor (EPO-R) - Homo | 1 . . . 508 | 454/508 (89%) | |
| | sapiens (Human), 508 aa. | | | |
| Q9MYZ9 | Erythropoietin receptor - | 1 . . . 458 | 386/509 (75%) | 0.0 |
| | Sus scrofa (Pig), 509 aa. | 1 . . . 509 | 402/509 (78%) | |
| P14753 | Erythropoietin receptor | 1 . . . 458 | 375/508 (73%) | 0.0 |
| | precursor (EPO-R) - Mus | 1 . . . 507 | 397/508 (77%) | |
| | musculus (Mouse), 507 aa. | | | |
| AAH03953 | Similar to erythropoietin | 2 . . . 458 | 374/507 (73%) | 0.0 |
| | receptor - Mus musculus | 1 . . . 506 | 396/507 (77%) | |
| | (Mouse), 506 aa (fragment). | | | |
| Q07303 | Erythropoietin receptor | 1 . . . 458 | 371/508 (73%) | 0.0 |
| | precursor (EPO-R) - Rattus | 1 . . . 507 | 399/508 (78%) | |
| | norvegicus (Rat), 507 aa. | | | |

[0447] PFam analysis predicts that the NOV 15a protein contains the domains shown in the Table 15F.

TABLE 15F
Domain Analysis of NOV15a

| | | Identities/ | |
|---|---|---|---|
| | | Similarities for | |
| Pfam | NOV15a Match | the Matched | Expect |
| Domain | Region | Region | Value |
| fn3 | 145 . . . 228 | 21/88 (24%) | 0.00059 |
| | | 59/88 (67%) | |

### Example 16

[0448] The NOV16 clone was analyzed, and the nucleotide and encoded polypeptide sequences are shown in Table 16A.

TABLE 16A
NOV16 Sequence Analysis

| | |
|---|---|
| SEQ ID NO: 55 | 751 bp |

| NOV16 a, | CGCGGCAGCTCCCACCATGGCGGAGACCAAGCTCCAGCTGTTTGTCAAGGCGAGTGAG | |
|---|---|---|
| CG158983-01 DNA | | |
| Sequence | GACGGGGAGAGCGTGGGTCACTGCCCCTCCTGCCAGCGGCTCTTCATGGTCCTGCTCC | |
| | TCAAGGGCGTACCTTTCACCCTCACCACGGTGGACACGCGCAGGTCCCCGGACGTGCT | |
| | GAAGGACTTCGCCCCCGGCTCGCAGCTGCCCATCCTCCTCTATGACAGCGACGCCAAG | |
| | ACAGACACGCTGCAGATCGAGGACTTTCTGGAGGAGACGCTGGGGCCGCCCGAGGAGT | |
| | CCAACACCGCCGGCAACGACGTTTTCCACAAGTTCTCCGCGTTCATCAAGAACCCGGT | |
| | GCCCGCGCAGGACGAAGCCCTGTACCAGCAGCTGCTGCGCGCCCTCGCCAGGCTGGAC | |
| | AGCTACCTGCGCGCGCCCCTGGAGCACGAGCTGGCGGGGGAGCCGCAGCTGCGCGAGT | |
| | CCCGCCGCCGCTTCCTGGACGGCGACAGGCTCACGCTGGCCGACTGCAGCCTCCTGCC | |
| | CAAGCTGCACATCGTCGACACGGTGTGCGCGCACTTCCGCCAGGCGCCCATCCCCGCG | |
| | GAGTGCGCGGCGTACGCCGTTACCTGGACAGCGCGATGCAGGAGAAAGAGTTCAAATA | |
| | CACGTGTCCGCACAGCGCCGAGATCCTGGCGGCCTACCGGCCCGCCGTGCACCCCACG | |
| | CTAGCGCCCCACCCCGCGTCTGTCGCCCAATAAAGGCATCTTTGTCGGOAAAAAA | |
| | ORF Start: ATG at 17 | ORF Stop: TAG at 698 |

| | | |
|---|---|---|
| SEQ ID NO: 56 | 227 aa | MW at 25431.7kD |

| NOV16 a, | MAETKLQLFVKASEDGESVGHCPSCQRLFMVLLLKGVPFTLTTVDTRRSPDVLKDFAP | |
|---|---|---|
| CG158983-01 | | |
| Protein Sequence | GSQLPILLYDSDAKTDTLQIEDPLEETLGPPEESNTAGNDVFHKFSAFIKNPVPAQDE | |
| | ALYQQLLRALARLDSYLRAPLEHELAGEPQLRESRRRFLDGDRLTLADCSLLPKLHIV | |
| | DTVCAHFRQAPIPAECAAYAVTWTARCRRKSSNTRVRTAPRSWRPTGPPCTPR | |
| | SEQ ID NO: 57 | 693 bp |

| NOV16b, | CCCACCATGGCGGAGACCAAGCTCCAGCTGTTTGTCAAGGCGAGTGAGGACGGGGAGA | |
|---|---|---|
| CG158983-02 DNA | | |
| Sequence | GCGTGGGTCACTGCCCCTCCTGCCAGCGGCTCTTCATGGTCCTGCTCCTCAAGGGCGT | |
| | ACCTTTCACCCTCACCACGGTCGACACGCGCAGGTCCCCGGACGTGCTGKTGGACTTC | |
| | GCCCCCGGCTCGCAGCTGCCCATCCTGCTCTATGACAGCGACGCCAGACAGAGCACGC | |
| | TGCAGATCGAGGACTTTCTGGAGGAGACGCTGGGGCCGCCCGAGGAGTCCGACACCGC | |
| | CGGCAACGACGTTTTCCACAAGTTCTCCGCGTTCATCAAGAGCCCGGTGCCCGCGCAG | |
| | GACGAAGCCCTGTACCAGCAGCTGCTGCCCGCCCTCGCCAGGCTGGACAGCTACCTGC | |
| | GCGCGCCCCTGGAGCACGAGCTGGCGGGGGAGCCGCAGCTGCGCGAGTCCCGCCGCCG | |
| | CTTCCTGGACGGCGACAGGCTCACGCTGGCCGACTGCAGCCTCCTGCCCAGGCTGCAC | |
| | ATCGTCGACACGGTGTGCGCGCACTTCCGCCAGGCGCCCATCCCCGCGGAGCTGCGCG | |
| | GCGTACGCCGCTACCTGGACACCGCGATGCAGGAGAAAGAGTTCACGTACACGTGTCC | |
| | GCACAGCGCCGAGATCCTGGCGGCCTACCGGCCCGCCGTGCACCCCCGCTAGCGC | |
| | ORF Start: ATG at 7 | ORF Stop: TAG at 688 |

| | | |
|---|---|---|
| SEQ ID NO: 58 | 227 aa | MW at 25573.8kD |

| NOV16b, | AETKLQLFVKASEDGESVGHCPSCQRLFMVLLLKGVPFTLTTVDTRRSPDGKTKDFAP | |
|---|---|---|
| CG158983-02 | | |
| Protein Sequence | GSQLPILLYDSDAKTDTLQIEDFLEETLGPPEESNTAGNDVFHKFSAFITKPVPAQDE | |
| | ALYQQLLRALARLDSYLRAPLEHELAGEPQLRESRRRFLDGDRLTLADCSLLPKLHIV | |
| | DTVCAHFRQAPIPAELRGVRRYLDSAMQEKEFKYTCPHSAEILAAYRPAVHPR | |
| | SEQ ID NO: 59 | 784 bp |

| NOV16c, | CGGCCGCGTCGACGCGGCAGCTCCCACCATGGCGGAGACCGTGCTCCAGCTGTTTGTC | |
|---|---|---|
| CG158983-03 DNA | | |
| Sequence | AAGGCGAGTGAGGACGGGGAGAGCGTGCGTCACTGCCCCTCCTGCCAGCGGCTCTTCA | |
| | TGGTCCTGCTCCTCAAGGGCGTACCTTTCACCCTCACCACGGTGGACACGCGCAGGTC | |
| | CCCGGACGTGCTGAAGGACTTCGCCCCCGGCTCGCAGCTGCCCATCCTGCTCTATGAC | |
| | AGCGACGCCAAGACAGACACGCTGCAGATCGAGGACTTTCTGGAGGAGACGCTGGGGC | |
| | CGCCCGAGGAGTCCAACACCGCCGGCAACGACGTTTTCCACAAGTTCTCCGCGTTCAT | |
| | CAAGAACCCGGTGCCCGCGCAGGACGAAGCCCTGTACCAGCAGCTGCTGCGCGCCCTC | |
| | GCCAGGCTGGACAGCTACCTGCGCGCGCCCCTGGAGCACGAGCTGGCGGGGGAGCCGC | |
| | AGCTGCGCGAGTCCCGCCGCCGCTTCCTGGACGGCGACAGGCTCACGCTGGCCGACTG | |
| | CAGCCTCCTGCCCAAGCTGCACATCGTCGACACGGTGTGCGCGCACTTCCGCCAGGCG | |
| | CCCATCCCCGCGGAGCTGCGCGGCGTACGCCGCTACCTGGACAGCGCGATGCAGGAGA | |
| | AAGAGTTCAAATACACGTGTCCGCACAGCGCCGAGATCCTGGCGGCCTACCGGCCCGC | |
| | CGTGCACCCCCGCTAGCGCCCCACCCCGCGTCTGTCGCCCAATAAAGGCATCTTTGTC | |
| | GGGAAAAAAAAAAAAAAAAAATTAAAAAAA | |
| | ORF Start: ATG at 29 | ORF Stop: TAG at 710 |

| | | |
|---|---|---|
| SEQ ID NO: 60 | 227 aa | MW at 25573.8kD |

| NOV16c, | MAETKLQLFVKASEDGESVGHCPSCQRLFMVLLLKGVPFTLTTVDTRRSPDVLKDFAP | |
|---|---|---|
| CG158983-03 | | |
| Protein Sequence | GSQLPILLYDSDAKTDTLQIEDFLEETLGPPEESNTAGNDVFHKFSAFIKNPVPAQDE | |
| | ALYQQLLRALARLDSYLRAPLEHELAGEPQLRESRRRFLDGDRLTLADCSLLPKLHIV | |
| | DTVCAHFRQAPIPAELRGVRRYLDSAMQEKEFKYTCPHSAEILAAYRPAVHPR | |
| | SEQ ID NO: 61 | 751 bp |

| NOV16d, | CGCGGCAGCTCCCACCATGGCGGAGACCAAGCTCCAGCTGTTTGTCGAGGCGAGTGAG | |
|---|---|---|
| CG158983-01 DNA | | |
| Sequence | GACGGGGAGAGCGTGGGTCACTGCCCCTCCTGCCAGCGGCTCTTCATGGTCCTGCTCC | |
| | TCAAGGGCGTACCTTTCACCCTCACCACGGTGGACACGCGCAGGTCCCCGGACGTGCT | |
| | GAAGGACTTCGCCCCCGGCTCGCAGCTGCCCATCCTGCTCTATGACAGCGACGCCTCG | |
| | ACAGACACGCTGCAGATCGAGGACTTTCTGGAGGAGACGCTGGGGCCGCCCGAGGAGT | |
| | CCAACACCGCCGGCAACGACGTTTTCCACAAGTTCTCCGCGTTCATCAAGAACCCGGT | |
| | GCCCGCGCAGGACGAAGCCCTGTACCAGCAGCTGCTGCGCGCCCTCGCCAGGCTGGAC | |
| | AGCTACCTGCGCGCGCCCCTGGAGCACGAGCTGGCGGGGGAGCCGCAGCTGCGCGAGT | |
| | CCCGCCGCCGCTTCCTGGACGGCGACAGGCTCACGCTGGCCGACTGCAGCCTCCTGCC | |
| | CAAGCTGCACATCGTCGACACGGTGTGCGCGCACTTCCGCCAGGCGCCCATCCCCGCG | |
| | GAGTGCGCGGCGTACGCCGTTACCTGGACAGCGCGATGCAGGAGAAAGAGTTCAAATA | |
| | CACGTGTCCGCACAGCGCCGAGATCCTGGCGGCCTACCGGCCCGCCGTGCACCCCACG | |
| | CTAGCGCCCCACCCCGCGTCTGTCGCCCAATAAAGGCATCTTTGTCGGGAAAAAA | |
| | ORF Start: ATG at 17 | ORF Stop: TAG at 698 |

| | | |
|---|---|---|
| SEQ ID NO: 62 | 227 aa | MW at 25431.7kD |

| NOV16d, | MAETKLQLFVKASEDGESVGHCPSCQRLFMVLLLKGVPFTLTTVDTRRSPDVLKDFAP | |
|---|---|---|
| CG158983-01 | | |
| Protein Sequence | GSQLPILLYDSDAKTDTLQIEDFLEETLGPPEESNTAGNDVFHKFSAFIKNPVPAQDE | |
| | ALYQQLLRALARLDSYLRAPLEHELAGEPQLRESRRRFLDGDRLTLADCSLLPKLHIV | |
| | DTVCAHFRQAPIPAECAAYAVTWTARCRRKSSNTRVRTAPRSWRPTGPPCTPR | |
| | SEQ ID NO: 63 | 751 bP |

| NOV16e, | CGCGGCAGCTCCCACCATGGCGGAGACCAAGCTCCAGCTGTTTGTCGAGGCGAGTGAG | |
|---|---|---|
| CG158983-01 DNA | | |
| Sequence | GACGGGGAGAGCGTGGGTCACTGCCCCTCCTGCCAGCGGCTCTTCATGGTCCTGCTCC | |
| | TCAAGGGCGTACCTTTCACCCTCACCACGGTGGACACGCGCAGGTCCCCGGACGTGCT | |
| | GAAGGACTTCGCCCCCGGCTCGCAGCTGCCCATCCTGCTCTATGACAGCGACGCCAAG | |
| | ACAGACACGCTGCAGATCGAGGACTTTCTGGAGGAGACGCTGGGGCCGCCCGAGGAGT | |
| | CCAACACCGCCGGCAACGACGTTTTCCACAAGTTCTCCGCGTTCATCAAGAACCCGGT | |
| | GCCCGCGCAGGACGAAGCCCTGTACCAGCAGCTGCTGCGCGCCCTCGCCAGGCTGGAC | |
| | AGCTACCTGCGCGCGCCCCTGGAGCACGAGCTGGCGGGGGAGCCGCAGCTGCGCGAGT | |
| | CCCGCCGCCGCTTCCTGGACGGCGACAGGCTCACGCTGGCCGACTGCAGCCTCCTGCC | |
| | CAAGCTGCACATCGTCGACACGGTGTGCGCGCACTTCCGCCAGGCGCCCATCCCCGCG | |
| | GAGTGCGCGGCGTACGCCGTTACCTGGACAGCGCGATGCAGGAGGAGTTCATA | |
| | CACGTGTCCGCACAGCGCCGAGATCCTGGCGGCCTACCGGCCCGCCGTGCACCCCACG | |
| | CTAGCGCCCCACCCCGCGTCTGTCGCCCAATAAAGGCATCTTTGTCGGG | |
| | ORF Start: ATG at 17 | ORF Stop: TAG at 698 |

| | | |
|---|---|---|
| SEQ ID NO:64 | 227 aa | MW at 25431.7kD |

| | |
|---|---|
| NOV16e, | MAETKLQLFVKASEDGESVGHCPSCQRLFMVLLLKGVPFTLTTVDTRRSPDVLKDFAP |
| CG158983-01 | |
| Protein Sequence | GSQLPILLYDSDAKTDTLQIEDFLEETLGPPEESNTAGNDVFHKFSAFIHQPVPAQDE |
| | ALYQQLLRALARLDSYLRAPLEHELAGEPQLRESRRRFLDGDRLTLAQCSLLPKLHIV |
| | DTVCAHFRQAPIPAECAAYAVTWTARCRRKSSNTRVRTAPRSWRPTGPPCTPR |

[0449] Sequence comparison of the above protein sequences yields the following sequence relationships shown in Table 16B.

TABLE 16B
Comparison of NOV16a against NOV16b through NOV16e.

| | | Identities/ |
|---|---|---|
| | | Similarities for |
| Protein | NOV16a Residues/ | the Matched |
| Sequence | Match Residues | Region |
| Nov16b | 1 . . . 189 | 189/189 (100%) |
| | 1 . . . 189 | 189/189 (100%) |
| NOV16c | 1 . . . 189 | 189/189 (100%) |
| | 1 . . . 189 | 189/189 (100%) |
| Nov16d | 1 . . . 227 | 227/227 (100%) |
| | 1 . . . 227 | 227/227 (100%) |
| NOV16e | 1 . . . 227 | 227/227 (100%) |
| | 1 . . . 227 | 227/227 (100%) |

[0450] Further analysis of the NOV16a protein yielded the following properties shown in Table 16C.

TABLE 16C
Protein Sequence Properties NOV16a

| | |
|---|---|
| PSort | 0.9000 probability located in Golgi body; |
| analysis: | 0.7900 probability located in plasma membrane; |
| | 0.3000 probability located in microbody |
| | (peroxisome); 0.2000 probability located in |
| | endoplasmic reticulum (membrane) |
| SignalP | Cleavage site between residues 43 and 44 |
| analysis: | |

[0451] A search of the NOV16a protein against the Geneseq database, a proprietary database that contains sequences published in patents and patent publication, yielded several homologous proteins shown in Table 16D.

TABLE 16D
Geneseq Results for NOV16a

| | | NOV16a | Identities/ | |
|---|---|---|---|---|
| | | Residues/ | Similarities for | |
| Geneseq | Protein/Organism/Length | Match | the Matched | Expect |
| Identifier | [Patent #, Date] | Residues | Region | Value |
| AAW61550 | Human chloride channel | 1 . . . 227 | 226/236 (95%) | e−129 |
| | protein - Homo sapiens, 241 | 6 . . . 241 | 227/236 (95%) | |
| | aa. [WO9830691-A1, 16 JUL. | | | |
| | 1998] | | | |
| AAU23722 | Novel human enzyme | 20 . . . 189 | 162/179 (90%) | 8e−87 |
| | polypeptide #808 - Homo | 6 . . . 184 | 163/179 (90%) | |
| | sapiens, 222 aa. | | | |
| | [WO200155301-A2, 02 AUG. | | | |
| | 2001] | | | |
| AAM40512 | Human polypeptide SEQ ID NO | 3 . . . 189 | 101/198 (51%) | 6e−49 |
| | 5443 - Homo sapiens, 312 aa. | 60 . . . 257 | 134/198 (67%) | |
| | [WO200153312-A1, 26 JUL. | | | |
| | 2001] | | | |
| AAM38726 | Human polypeptide SEQ ID NO | 3 . . . 189 | 101/198 (51%) | 6e−49 |
| | 1871 - Homo sapiens, 308 aa. | 71 . . . 268 | 134/198 (67%) | |
| | [WO200153312-A1, 26 JUL. | | | |
| | 2001] | | | |
| AAM79354 | Human protein SEQ ID NO | 3 . . . 189 | 101/198 (51%) | 6e−49 |
| | 3000 - Homo sapiens, 312 aa. | 60 . . . 257 | 134/198 (67%) | |
| | [WO200157190-A2, 09 AUG. | | | |
| | 2001] | | | |

[0452] In a BLAST search of public sequence datbases, the NOV16a protein was found to have homology to the proteins shown in the BLASTP data in Table 16E.

TABLE 16E
Public BLASTP Results for NOV16a

| | | NOV16a | Identities/ | |
|---|---|---|---|---|
| Protein | | Residues/ | Similarities for | |
| Accession | | Match | the Matched | Expect |
| Number | Protein/Organism/Length | Residues | Portion | Value |
| O95833 | Chloride intracellular | 30 . . . 189 | 159/169 (94%) | 4e−85 |
| | channel protein 3 - Homo | 1 . . . 169 | 160/169 (94%) | |
| | sapiens (Human), 207 aa. | | | |
| Q9D7P7 | 2300003G24Rik protein - Mus | 30 . . . 189 | 143/169 (84%) | 2e−76 |
| | musculus (Mouse), 207 aa. | 1 . . . 169 | 149/169 (87%) | |
| Q9Z0W7 | Chloride intracellular | 3 . . . 187 | 102/196 (52%) | 3e−49 |
| | channel protein 4 | 16 . . . 211 | 133/196 (67%) | |
| | (Intracellular chloride ion | | | |
| | channel protein P64H1) - | | | |
| | Rattus norvegicus (Rat), 253 | | | |
| | aa. | | | |
| Q9QYB1 | Intracellular chloride | 3 . . . 187 | 102/196 (52%) | 5e−49 |
| | channel protein - Mus | 16 . . . 211 | 133/196 (67%) | |
| | musculus (Mouse), 253 aa. | | | |
| Q9Y696 | Chloride intracellular | 3 . . . 189 | 101/198 (51%) | 2e−48 |
| | channel protein 4 | 16 . . . 213 | 134/198 (67%) | |
| | (Intracellular chloride ion | | | |
| | channel protein p64H1) - Homo | | | |
| | sapiens (Human), 253 aa. | | | |

[0453] PFam analysis predicts that the NOV16a protein contains the domains shown in the Table 16F.

TABLE 16F
Domain Analysis of NOV16a

| | | | |
|---|---|---|---|
| | | Identities/ | |
| | | Similarities for | |
| Pfam | NOV16a Match | the Matched | Expect |
| Domain | Region | Region | Value |

No Significant Matches Found

### Example 17

[0454] The NOV17 clone was analyzed, and the nucleotide and encoded polypeptide sequences are shown in Table 17A.

TABLE 17A
NOV17 Sequence Analysis

| | |
|---|---|
| SEQ ID NO: 65 | 2400 bp |

| NOV17a, | GTGCGCGTTGGGGCGGCCGGCCAATGCCGGACCGCTTCGGCACCCCCCGCCCGATCCC | |
|---|---|---|
| CG159015-01 DNA | | |
| Sequence | TCCACCCGTGGGCCGGCAATGGCGGGCGCAGTTTCGCTCTTGGGTGTGGTGGGGCTGC | |
| | TGCTTGTGTCTCCGCTGTCCGGCGTCCTAGGAGACCGCGCCAATCCCGACCTCCGGGC | |
| | ACACCCAGGGAACGCAGCCCACCCCGGCTCTGGAGCCACGGAACCCCGGCGGCGACCA | |
| | CCGCTCAAGGATCAACGCGAGCGGACCCGGGCCGGGTCGCTGCCTCTGGGGGCGCTGT | |
| | ACACCGCGGCCGTCGCGGCTTTTGTGCTGTACAAGTGTTTGCAGGGGAAAGATGAAAC | |
| | TGCGGTTCTCCACGAGGAGGCAAGCAAGCAGCAGCCACTGCAGTCAGAGCAACAGCTG | |
| | GCCCAGTTGACACAACAGCTGGCCCAGACAGAGCAGCACCTGAACAACCTGATGGCCC | |
| | AGCTGGACCCCCTTTTTGAGCGTGTGACTACTCTGGCTGGAGCCCAGCAGGAGCTTCT | |
| | GAACATGAAGCTATGGACCATCCACGAGCTGCTGCAAGATAGCAAGCCGGACAAGGAT | |
| | ATCGACGCTTCAGAACCAGGTGAACGCTCGGGAGGCGAGTCTCCTGGAGGTCGAGACA | |
| | AAGTCTCTGAAACTGGAACATTCCTGATCTCTCCCCACACAGAGGCCAGCAGACCTCT | |
| | TCCTGAGGACTTCTGTTTAAAGGAGGACGAGGAGGAGGTTGGTGACAGTCAGCCCTGG | |
| | GAGGAGCCCACAAACTGGAGCACAGAGACATGGAACCTAGCTACTTCCTGGGAGGTGG | |
| | GGCGGGGACTACGGAGAAGGTCCAGCCAGGCTGTGGCAAAGCGCCCCAGTCACAGCCT | |
| | TGGCTGGGAAGGAGGGACGACAGCTGAAGGTCGACTAAAACAAAGTCTGTTTTCATGA | |
| | TGGAGTGCTCCTGTGTGTTTTTTCGATCCTAGTTGGTTGTACACACCCATACTAGGTG | |
| | CCTAAGGACAACTGGGCCTTCTTGAAGAGCTGTCCTTATTAGGACAAAAAGAGGCTGC | |
| | CTTCCAGTGTGACAGCAGAGAAGATAGAGGGAGCTCCAGCTCTTTTCCTCGTATTCCT | |
| | GAGGCCACCAGCATGCCCGCGTTCAGGGCCCAAAAATCCCTTTTCTCATAGCAAAACT | |
| | GAGACAGAAGGGTCTTTCCCAAAAAAAAGAAAAAAAAACTTTACTCAAATCCAGTGGA | |
| | AAAATAAATCATACAAACTATACACAACATAAAAATAGCCACATTTACAAACCTCCAC | |
| | CCTTGATAAATGACGGGCCATGCACACACCACAGAGCTTATCAGTCCCAAATCCCCTC | |
| | ATCTGTGTTAGGGGCTGGTTCATTTGAGGTTTAGTTGGGTTGGACTTGGTTTCCTGAT | |
| | TCTTCTTTTTTAATAAAATTTCTTAATTATTTTTTCTTAAATAGACACAGGGTCTCAC | |
| | TCACTGTGTTGCCCAGGCTGGTCTTGAACTCCTGGGCTGGAATGATCCTGCCACCTCT | |
| | GCTTCCCAAAGTGCTGGGATTACAGGCATGAGCCACTGTGCCTGGCCGTGATTTTTAA | |
| | GAGTTGGTCAGATGATCTGGAGTAGCTTGGTCCAGGCAAACAGAAAGTGACCTTTGTC | |
| | AAATCATGAAGGGTTCTGTTTTGTTCAGTACTGAAGATTCCTTTGTACTCTTGGCTGT | |
| | GACCTATCCCTGAGGTATCCTGAGTTCTGGAATCTATAAGATTCCTCTAGTTTTTCTG | |
| | GCTGCTGATAGCCCAAGTCAGACTGTGGTACCAGCGTGACAGCTCCTCCTGGTCTGTG | |
| | CACATAAGCAGTAGCTTCTCATGAGGGAAGGACAGGTGTGAGCTGTTGATGGTCAGGG | |
| | CTGTTGGGACCTGTGTTTTCAGCCAAAGCTACGACGAGATTCTCATACTGCTGGAGCC | |
| | GTTGCAGAGGCAGAGOGAGCAGGTCCTGGAGCTGAAGCCCCCCAAACCCAGGGCGGCC | |
| | TTCCTGAAGCCCTACAAACCTCCGGAAACCTTTATTTTTCTTTAGCTGCTCCTGCAGG | |
| | GTGGTCTGGGACCTCTCTGAGTTGGCAGCAAATTGGTTATAGAGCTCCAAGTGGCGGC | |
| | AGAAGCCCTCCAGCCCTTGGCCCCAGCATCCTCCTTCCAGGTAGGGAAGCAGCTCCTG | |
| | GCTGGCGCCGTAGATGAGCTCCCAGGAGCCAAACAGGGCCTGGCGCTCAGGTGGTCGC | |
| | AGGGTCCCCTTGGCTTTCAGGATCCCCAAAAAGTACGTGGCCACCAGCCCCAGCTGTT | |
| | CTTGGTAGCGCCGCTCGGTCTCTAGCAGCTCCCGGGCGGTGCAGGCGCGTTTCCGCTC | |
| | CCAGCGGGCACGCTGCTCTTGCACCGGGCACCGCGAACCGGGGCAUGAGAGCTCCATG | |
| | CCCTGGCTGAGGGATCGACACT | |
| | ORF Start: ATG at 77 | ORF Stop: TGA at 926 |

| | | |
|---|---|---|
| SEQ ID NO: 66 | 283 aa | MW at 30494.7kD |

| NOV17a, | MAGAVSLLGVVGLLLVSALSGVLGDRANPDLRAHPGNAAHPGSGATEPRRRPPLKDQR | |
|---|---|---|
| CG159015-01 | | |
| Protein Sequence | ERTRAGSLPLGALYTAAVAAFVLYKCLQGKDETAVLHEEASKQQPLQSEQQLAQLTQQ | |
| | LAQTEQHLNNLMAQLDPLFERVTTLAGAQQELLNMKLWTTHELLQDSKPDKDMEASEP | |
| | GEGSGGESAGGGDKVSETGTFLISPHTEASRPLPEDFCLKEDEEEVCDSQAWEEPTNW | |
| | STETWNLATSWEVGRGLRRRCSQAVAKGPSHSLGWEGGTTAEGRLKQSLFS | |
| | SEQ ID NO: 67 | 1449 bp |

| NOV17b, | GGTGAGAAGTTGGTGGCGTGAGATTAAAAAAACCGTTTTCGGGCATAACTTTCTAAG | |
|---|---|---|
| CG159015-02 DNA | | |
| Sequence | ACTATAGGCTTTCAGAGGCATTGTGGCTAGCAGAATAGCTAATAGACACGAAATGAAC | |
| | AAATACAGGAAAGCTAGAATGACACTATCTTATGCAAATATGGTCTGGCCCCGCCCTA | |
| | CGGGGAGTGGGCGTGGCCTCCCCGGAGCCGGCCGGCCTGCTCGCGTGCOCGTGCGCGT | |
| | TGGGGCGGCCGGCCAATGCCGGACCGCTTCCGCACCGCCCGCCCGATCCCTCCACCCG | |
| | TGGGCCGGCAATGGCGGGCGCAGTTTCGCTCTTGGGTGTGGTGGGGCTGCTGCTTGTG | |
| | TCTGCGCTGTCCGGGGTCCTAGGAGACCGCGCCAATCCCGACCTCCGGGCACACCCAG | |
| | GTAACGCAGCCCACCCCGGCTCTGGAGCCACGGAACCCCGGCGGCGACCACCGCTCAG | |
| | GGATCAACGCGAGCGGACCCGGGCCGGGTCGCTGCCTCTGGGGGCGCTGTACACCGCG | |
| | GCCGTCGCGGCTTTTGTGCTGTACAAGTGTTTGCACGGGAAAGATGGTGCTGCGGTTC | |
| | TCCACGAGGAGGCAAGCAAGCAGCAGCCACTGCAGTCAGAGCGCCAGCTGCCCCAGTT | |
| | GACACAACAGCTGGCCCAGACAGAGCAGCACCTGAACAACCTGATGGCCCAGCTGGAC | |
| | GCCCTTTTTGAGCGGGTGACTACTCTGGCTGGACCCCAGCAGGAGCTTCTGAACATGA | |
| | AGCTATGGACCATCCACGAGCTGCTGCAAGATAGCAAGCCGGACGAGGATATGGAGGC | |
| | TTCAGAACCAGGTGAAGCCTCGGGAGGCGAGTCTGCTGGAGGTGGAGACATCGTCTCT | |
| | GAAACTGGAACATTCCTGATCTCTCCCCACACAGAGGCCAGCAGACCTCTTCCTGAGG | |
| | ACTTCTGTTTAAAGGAGGACGAGGAGGAGATTGGTGACAGTCACGCCTGGGAGGAGCC | |
| | CACAAACTGGAGCACAGAGACATGGAACCTAGCTACTTCCTGGGAGGTGGGGCGGGGA | |
| | CTACGGAGAAGGTGCAGCCAGGCTGTGGCAAAGGGCCCCAGTCACAGCCTTCGCTGGG | |
| | AAGGAGGGACGACAGCTGAAGGTCGACTAAAACAAAGTCTGTTTTCATGATGGAGTGC | |
| | TCCTGTGTGTTTTTTCGATCCTAGTTGGTTGTACACACCCATACTAGGTGCCTCTGGA | |
| | CAACTGGGCCTTCTTGAAGAGCTGTCCTTATTAGGACAAAAAGAGGCTGCCTTCCAGT | |
| | GTGACAGCAGAGAAGATAGAGGGAGCTCCAGCTCTTTTCCTCGTATTCCTGAGGCCAC | |
| | CAGCATGCCCGCGTTCAGGGCCCAAAAATCCCTTTTCTCATAGCGCATCTGAGACAGA | |
| | AGGGTCTTTCCCAAAAAAAAGAAAAAAAACTTTACTCAAATCCAGTGGAAAAATAAA | |
| | ORF Start: ATG at 148 | ORF Stop: TGA at 1150 |

| | | |
|---|---|---|
| SEQ ID NO: 68 | 334 aa | MW at 35589.5kD |

| NOV17b, | MQIWSGPALRGVGVASPEPAGLLACACALGRPANAGPLRHRPPDPSTRCPEQAGAVSL | |
|---|---|---|
| CG159015-02 | | |
| Protein Sequence | LGVVGLLLVSALSGVLGDRANPDLRAHPGNAAHPGSGATEPRRRPPLKDQRGERTKGS | |
| | LPLGALYTAAVAAFVLYKCLQGKDETAVLHEEASKQQPLQSEQQLAQLTQLAQQTEQH | |
| | LNNLMAQLDPLFERVTTLAGAQQELLNMKLWTIHELLQDSKPDKDMEASEPGEGSGGE | |
| | SAGGGDKVSETCTFLISPHTEASRPLPEDFCLKEDEEEIGDSQAWEEPTNWSTETWNL | |
| | ATSWEVGRGLRRRCSQAVAKGPSHSLGWEGGTTAEGRLKQSLFS | |
| | SEQ ID NO: 69 | 539 bp |

| NOV17c, | CCGGCCAATGCCGGACCGCTTCCGCACCGCCCGCCCGATCCCTCCACCCGTGGGCCGG | |
|---|---|---|
| CG159015-03 | DNA | |
| Sequence | CAATGGCGGGCGCAGTTTCGCTCTTGGGTGTGGTGGGGCTGCTGCTTGTGTCTGCGCT | |
| | GTCCGGGGTCCTAGGAGACCCCGCCAATCCCGACCTCCGGGCACACCCAGGGGACGCA | |
| | GCCCACCCCGGCTCTGGAGCCACGGGTCCCCGGCGGCGACCACCGCTCGTGGATCAAC | |
| | GCGAGCGGACCCGGGCCGGGTCGCTGCCTCTGGGCGCGCTGTACACCGCGGCCGTCGC | |
| | GGCTTTTGTGCTGTACAAGTGTTTGCACGGGACAGATGAAACTGCGGTTCTCCACGAG | |
| | GAGGCAAGCAAGCAGCAGCCACTGCAGTCAGAGCAACAGCTGCCCCAGTTGACACAAC | |
| | AGCTGGCCCAGACAGAGCAGCACCTGAACAACCTGATGCCCCAGCTGGACCCCCTTTT | |
| | TGAGCGCCCAGCAGGAGCTTCTGAACATGAAGCTATGGACCATCCACGAGCTGCTGCA | |
| | AGATAGCAAGCCCGGAC | |
| | ORF Start: ATG at 61 | ORF Stop: TAG at 526 |

| | | |
|---|---|---|
| SEQ ID NO: 70 | 155 aa | MW at 16521.5kD |

| NOV17c, | MAGAVSLLGVVGLLLVSALSGVLGDRANPDLRAHPGNAAHPGSGATEPRRRPPLKDQR | |
|---|---|---|
| CG159015-03 | | |
| Protein Sequence | ERTRAGSLPLGALYTAAVAAFVLYKCLQGKDETAVLHEEASKQQPLQSEQQLAQLTQQ | |
| | LAQTEQHLNNLMAQLDPLFERPAGASEHEAMDHPRAAAR | |
| | SEQ ID NO: 71 | 774 bp |

| NOV17d, | GTGCGCGTTGGGGCGGCCGGCCAATGCCGGACCGCTTCGGCACCGCCCGCCCGATCCC | |
|---|---|---|
| CG159015-04 DNA | | |
| Sequence | TCCACCCGTGGGCCGGCAATGGCGGGCGCAGTTTCGCTCTTGGGTGTGGTGGOGCTGC | |
| | TGCTTGTGTCTGCGCTGTCCGGGGTCCTAGGAGACCGCGCCAATCCCGACCTCCOGGC | |
| | ACACCCAGGGAACGCAGCCCACCCCGGCTCTGGAGCCACGGAACCCCGGCGGCGACCA | |
| | CCGCTCAAGGATCAACGCGAGCGGACCCGGGCCGGGTCGCTGCCTCTGGGGGCGCTGT | |
| | ACACCGCGGCCGTCGCGGCTTTTGTGCTGTACAAGTGTTTGCAGGOGAAAGATGAAAC | |
| | TGCGGTTCTCCACGAGGAGGCAAGCAAGCAGCAGCCACTGCAOTCAGAGCAACAGCTG | |
| | GCCCAGTTGACACAACAGCTGGCCCAGACAGAGCAGCACCTGAACAACCTCATGGCCC | |
| | AGCTGGACCCCCTTTTTGAGCGGTGAGGAGAGCAATOATTCTGTGAATTTTTGGGGAA | |
| | TTTGTGGCAGGAGGGAGGAATGGGGACATAUGTTGGGAGCCACTGAGTGGACATTTCT | |
| | TCAGTGTGACTACTCTGGCTGGAGCCCAGCAGGAGCTTCTGAACATGAAGCTATGGAC | |
| | CATCCACGAGCTGCTGCAAGATAGCAAGCCGGACAAGGATATGGAGGCTTCAGAACCA | |
| | GGTGAAGGCTCGGGAGGCGAGTCTGCTGGAGGTGGAGACAAAGTCTCTOAAACTGGAA | |
| | CATTCCTGATCTCTCCCCCA | |
| | ORF Start: ATG at 77 | ORF Stop: TGA at 488 |

| | | |
|---|---|---|
| SEQ ID NO: 72 | 137 aa | MW at 14665.5kD |

| | |
|---|---|
| NOV17d, | MAGAVSLLGVVGLLLVSALSGVLGDRANPDLRANPGNAAHPGSGATEPRRRPPLKDQR |
| CG159015-04 | |
| Protein Sequence | ERTRACSLPLGALYTAAVAAFVLYKCLQGKDETAVLHEEASKQQPLQSEQQLAQLTQQ |
| | LAQTEQHLNNLMAQLDPLFER |

[0455] Sequence comparison of the above protein sequences yields the following sequence relationships shown in Table 17B.

TABLE 17B
Comparison of NOV17a against NOV17b through NOV17d.

| | | Identities/ |
|---|---|---|
| | | Similarities for |
| Protein | NOV17a Residues/ | the Matched |
| Sequence | Match Residues | Region |
| NOV17b | 1 . . . 283 | 282/283 (99%) |
| | 52 . . . 334 | 283/283 (99%) |
| NOV17c | 1 . . . 137 | 137/137 (100%) |
| | 1 . . . 137 | 137/137 (100%) |
| NOV17d | 1 . . . 137 | 137/137 (100%) |
| | 1 . . . 137 | 137/137 (100%) |

[0456] Further analysis of the NOV17a protein yielded the following properties shown in Table 17C.

TABLE 17C
Protein Sequence Properties NOV17a

| | |
|---|---|
| PSort | 0.8200 probability located in outside; 0.1000 |
| analysis: | probability located in endoplasmic reticulum |
| | (membrane); 0.1000 probability located in |
| | endoplasmic reticulum (lumen); 0.1000 |
| | probability located in lysosome (lumen) |
| SignalP | Cleavage site between residues 25 and 26 |
| analysis: | |

[0457] A search of the NOV17a protein against the Geneseq database, a proprietary database that contains sequences published in patents and patent publication, yielded several homologous proteins shown in Table 17D.

TABLE 17D
Geneseq Results for NOV17a

| | | NOV17a | Identities/ | |
|---|---|---|---|---|
| | | Residues/ | Similarities for | |
| Geneseq | Protein/Organism/Length | Match | the Matched | Expect |
| Identifier | [Patent #, Date] | Residues | Region | Value |
| ABB72305 | Rat protein isolated from | 1 . . . 262 | 163/263 (61%) | 1e−79 |
| | skin cells SEQ ID NO: 629 - | 1 . . . 233 | 184/263 (68%) | |
| | Rattus sp, 242 aa. | | | |
| | [WO200190357-A1, 29 NOV. | | | |
| | 2001] | | | |
| AAB88440 | Human membrane or secretory | 1 . . . 137 | 137/137 (100%) | 2e−72 |
| | protein clone PSEC0222 - | 1 . . . 137 | 137/137 (100%) | |
| | Homo sapiens, 139 aa. | | | |
| | [EP1067182-A2, 10 JAN. 2001] | | | |
| ABB68896 | Drosophila melanogaster | 85 . . . 224 | 33/140 (23%) | 0.001 |
| | polypeptide SEQ ID NO | 816 . . . 943 | 54/140 (38%) | |
| | 33480 - Drosophila | | | |
| | melanogaster, 2439 aa. | | | |
| | [WO200171042-A2, | | | |
| | 27 SEP. 2001] | | | |
| ABG28274 | Novel human diagnostic | 136 . . . 269 | 34/140 (24%) | 0.47 |
| | protein #28265 - Homo | 283 . . . 413 | 57/140 (40%) | |
| | sapiens, 1121 aa. | | | |
| | [WO200175067-A2, 11 OCT. | | | |
| | 2001] | | | |
| ABB64814 | Drosophila melanogaster | 59 . . . 172 | 29/120 (24%) | 0.81 |
| | polypeptide SEQ ID NO | 2621 . . . 2731 | 54/120 (44%) | |
| | 21234 - Drosophila | | | |
| | melanogaster, 3583 aa. | | | |
| | [WO200171042-A2, | | | |
| | 27 SEP. 2001] | | | |

[0458] In a BLAST search of public sequence datbases, the NOV17a protein was found to have homology to the proteins shown in the BLASTP data in Table 17E.

TABLE 17E
Public BLASTP Results for NOV17a

| | | NOV17a | Identities/ | |
|---|---|---|---|---|
| Protein | | Residues/ | Similarities for | |
| Accession | | Match | the Matched | Expect |
| Number | Protein/Organism/Length | Residues | Portion | Value |
| Q8WV48 | Similar to RIKEN cDNA | 1 . . . 283 | 283/283 (100%) | e−163 |
| | 1110032022 gene - Homo | 1 . . . 283 | 283/283 (100%) | |
| | sapiens (Human), 283 aa. | | | |
| Q9DCC3 | 1110032022Rik protein | 1 . . . 262 | 153/262 (58%) | 1e−74 |
| | (Hypothetical 26.6 kDa | 1 . . . 233 | 178/262 (67%) | |
| | protein) - Mus musculus | | | |
| | (Mouse), 242 aa. | | | |
| CAC39804 | Sequence 247 from Patent | 1 . . . 137 | 137/137 (100%) | 5e−72 |
| | EP1067182 - Homo sapiens | 1 . . . 137 | 137/137 (100%) | |
| | (Human), 139 aa. | | | |
| Q9CTB6 | 1110032022Rik protein - Mus | 35 . . . 262 | 133/228 (58%) | 4e−64 |
| | musculus (Mouse), 259 aa | 52 . . . 250 | 153/228 (66%) | |
| | (fragment). | | | |
| Q9VMS2 | CG14023 protein - Drosophila | 85 . . . 224 | 33/140 (23%) | 0.004 |
| | melanogaster (Fruit fly), | 816 . . . 943 | 54/140 (38%) | |
| | 2439 aa. | | | |

[0459] PFam analysis predicts that the NOV17a protein contains the domains shown in the Table 17F.

TABLE 17F
Domain Analysis of NOV17a

| | | | |
|---|---|---|---|
| | | Identities/ | |
| | | Similarities for | |
| Pfam | NOV17a Match | the Matched | Expect |
| Domain | Region | Region | Value |

No Significant Matches Found

### Example 18

[0460] The NOV18 clone was analyzed, and the nucleotide and encoded polypeptide sequences are shown in Table 18A.

TABLE 18A
NOV18 Sequence Analysis

| | |
|---|---|
| SEQ ID NO: 73 | 2463 bp |

| NOV18a, | AACTCTCCTATTCATGGAGGCGACACTGAGGATGCTTTCCACATGAACCCTGAAGTG | |
|---|---|---|
| CG173007-01 DNA | | |
| Sequence | AACTTCTGATACATTTCCTGCAGCAAGAGAAGGCAGCCAACATGAAGGAAAATGTGGC | |
| | ATCTGCAACCGTTTTCACTCTGCTACTTTTTCTCGCACCTGCCTTCTGATGGACAG | |
| | TTACCTCCTGGAAAACCTGAGATCTTTAAATGTCGTTCTCCCAATAAGGAAACATTCA | |
| | CCTGCTGGTGGAGGCCTGGGACAGATGGAGGACTTCCTACCAGCTCCTGCCACTTTGG | |
| | CAAGCAGTACACCTCCATGTGGAGGACATACATCATGATGGTCAATGCCACTAACCAG | |
| | ATGGGAAGCAGTTTCTCGGATGAACTTTATGTGGACGTGACTTACATAGTTCAGCCAG | |
| | ACCCTCCTTTGGAGCTGGCTGTGGAAGTAAAACAGCCAGAAGACAGAAAACCCTACCT | |
| | GTGGATTAAATGGTCTCCACCTACCCTGATTGACTTAAAAACTGGTTGGTTCACGCTC | |
| | CTGTATGAAATTCGATTAAAACCCGAGAAAGCAGCTGAGTGGGAGATCCATTTTGCTG | |
| | GGCAGCAAACAGAGTTTAAGATTCTCAGCCTACATCCAGGACAGAAATACCTTGTCCA | |
| | GGTTCGCTGCAAACCAGACCATGGATACTGGAGTGCATGGAGTCCAGCGACCTTCATT | |
| | CAGATACCTAGTGACTTCACCATGAATGATACAACCGTGTGGATCTCTGTGGCTGTCC | |
| | TTTCTGCTGTCATCTGTTTGATTATTGTCTGGGCAGTGGCTTTGAAGGGCTATAGCAT | |
| | GGTGACCTGCATCTTTCCGCCAGTTCCTGGGCCAAAAATAAAAGGATTTGATGCTCAT | |
| | CTGTTGGAGAAGGGCAAGTCTGAAGAACTACTGAGTGCCTTCGGATGCCGTGACTTTC | |
| | CTCCCACTTCTGACTATGAGGACTTGCTGGTGGAGTATTTAGAAGTAGATGATAGTGA | |
| | GGACCAGCATCTAATGTCAGTCCATTCAAAGAACACCCAATGTCGGGTATCTGAACCC | |
| | ACATACCTGGATCCTGACACTGACTCAGGCCGGGGGAGCTGTGACAGCCCTTCCCTTT | |
| | TGTCTGAAAAGTGTGAGGAACCCCAGGCCAATCCCTCCACATTCTATGATCCTGAGGT | |
| | CATTGAGAAGCCAGAGAATCCTGAAACAACCCACACCTGGGACCCCCAGTGCATAAGC | |
| | ATGGAAGGCAAAATCCCCTATTTTCATGCTGGTGGATCCAAATGTTCAACATGGCCCT | |
| | TACCACAGCCCAGCCAGCACAACCCCAGATCCTCTTACCACAATATTACTGATGTGTG | |
| | TGAGCTGGCTGTGGGCCCTGCAGGTGCACCGGCCACTCTGTTGAATGAAGCAGGTAAA | |
| | GATGCTTTAAAATCCTCTCAAACCATTAAGTCTACAGAAGAGGGAAAGGCAACCCACC | |
| | AGAGGGAGGTAGAAAGCTTCCATTCTGAGACTGACCACCATACGCCCTGGCTGCTGCC | |
| | CCAGGAGAAAACCCCCTTTGGCTCCGCTAAACCCTTGCATTATGTGGAGATTCACAAG | |
| | GTCAACAAAGATGGTCCATTATCATTGCTACCAAAACAGAGAGAGAACAGCGGCAAGC | |
| | CCAAGAAGCCCCGGACTCCTCAGAACAATAAGGAGTATGCCAAGGTGTCCGGGGTCAT | |
| | CGATAACAACATCCTGGTGTTGGTGCCAGATCCACATGCTAAAAACGTGGCTTGCTTT | |
| | GAAGAATCAGCCAAAGAGGCCCCACCATCACTTGAACAGAATCAAGCTGAGAAAGCCC | |
| | TGGCCAACTTCACTGCAACATCAAGCAAGTGCAGGCTCCAGCTGGGTGGTTTGGATTA | |
| | CCTGGATCCCGCATGTTTTACACACTCCTTTCACTGATAGCTTGACTAATCGAATGAT | |
| | TGGTTAAAATGTGATTTTTCTTCAGGTAACACTACAGAGTACGTGAAATGCTCAAGAA | |
| | TGTAGTCAGACTGACACTACTAAAGCTCCCAGCTCCTTTCATGCTCCATTTTTAACCA | |
| | CTTGCCTCTTTCTCCAGCAGCTGATTCCAGAACAAATCATTATGTTTCCTAACTGTGA | |
| | TTTGTAGATTTACTTTTTGCTGTTAGTTATAAAACTATGTGTTCAATGAAATAAAAGC | |
| | ACACTGCTTAGTATTCTTGAGGGACAATGCCAATAGGTATATCCTCTGGAAAAGGCTT | |
| | TCATCATTTGGCATGGGACAGACGGAAATGAAATTGTCAAAATTGTTTACCATAGAAA | |
| | GATGACAAAAGAAAATTTTCCACATAGGAAAATGCCATGAAAATTGCTTTTGAAAAAC | |
| | AACTGCATAACCTTTACACTCCTCGTCCATTTTATTACGATTACCCAAATATAACCAT | |
| | TTAAAGAAAGAATGCATTCCAGAACAAATTGTTTACATAAGTTCCTATACCTTACTGA | |
| | CACATTGCTGATATGCAAGTAAGAAAT | |
| | ORF Start: ATG at 100 | ORF Stop: TGA at 1891 |

| | | |
|---|---|---|
| SEQ ID NO: 74 | 597 aa | MW at 66638.8kD |

| | |
|---|---|
| NOV18a, | MKENVASATVFTLLLFLNTCLLNGQLPPGKPEIFKCRSPNKETFTCWWRPGTDGGLPT |
| CG173007-01 | |
| Protein Sequence | NSCHFGKQYTSMWRTYIMMVNATNQMGSSFSDELYVDVTYIVQPDPPLELAVEVKQPE |
| | DRKPYLWIKWSPPTLIDLKTGWFTLLYEIRLKPEKAAEWEIHFAGQQTEFKILSLHPG |
| | QKYLVQVRCKPDHGYWSAWSPATFIQIPSDFTMNDTTVWISVAVLSAVICLIIVWAVA |
| | LKGYSMVTCIPPPVPGPKIKGFDAHLLEKGKSEELLSALGCQDFPPTSDYEDLLVEYL |
| | EVDDSEDQHLMSVHSKEHPSQGMKPTYLDPDTDSGRGSCDSPSLLSEKCEEPQANPST |
| | FYDPEVIEKPENPETTHTWDPQCISMEGKIPYFHAGGSKCSTWPLPQPSQHNPRSSYH |
| | NITDVCELAVGPAGAPATLLNEAGKDALKSSQTIKSREEGKATQQREVESFHSETDQD |
| | TPWLLPQEKTPFGSAKPLDYVEIHKVNKDGALSLLPKQRENSGKPKKPGTPENNKEYA |
| | KVSGVMDNNILVLVPDPHAKNVACFEESAKEAPPSLEQNQAEKALANFTATSSKCRLQ |
| | LGGLDYLDPACFTHSFH |

[0461] Further analysis of the NOV18a protein yielded the following properties shown in Table 18B.

TABLE 18B
Protein Sequence Properties NOV18a

| | |
|---|---|
| PSort | 0.4600 probability located in plasma membrane; |
| analysis: | 0.1447 probability located in microbody |
| | (peroxisome); 0.1000 probability located in |
| | endoplasmic reticulum (membrane); 0.1000 |
| | probability located in endoplasmic reticulum (lumen) |
| SignalP | Cleavage site between residues 25 and 26 |
| analysis: | |

[0462] A search of the NOV18a protein against the Geneseq database, a proprietary database that contains sequences published in patents and patent publication, yielded several homologous proteins shown in Table 18C.

TABLE 18C
Geneseq Results for NOV18a

| | | NOV18a | Identities/ | |
|---|---|---|---|---|
| | | Residues/ | Similarities for | |
| Geneseq | Protein/Organism/Length | Match | the Hatched | Expect |
| Identifier | [Patent #, Date] | Residues | Region | Value |
| AAU99354 | Human prolactin receptor | 1 . . . 597 | 597/622 (95%) | 0.0 |
| | (PRLR) protein - Homo | 1 . . . 622 | 597/622 (95%) | |
| | sapiens, 622 aa. | | | |
| | [WO200250098-A2, 27 JUN. | | | |
| | 2002] | | | |
| AAR10795 | Human prolactin receptor - | 1 . . . 597 | 597/622 (95%) | 0.0 |
| | Homo sapiens, 622 aa. | 1 . . . 622 | 597/622 (95%) | |
| | [US4992378-A, 12 FEB. 1991] | | | |
| AAU99355 | Human prolactin receptor | 1 . . . 597 | 596/622 (95%) | 0.0 |
| | (PRLR) variant protein - | 1 . . . 622 | 597/622 (95%) | |
| | Homo sapiens, 622 aa. | | | |
| | [WO200250098-A2, 27 JUN. | | | |
| | 2002] | | | |
| AAY95527 | Human prolactin receptor | 1 . . . 311 | 311/336 (92%) | 0.0 |
| | novel isoform - Homo | 1 . . . 336 | 311/336 (92%) | |
| | sapiens, 349 aa. [US6083753- | | | |
| | A, 04 JUL. 2000] | | | |
| AAY96921 | Soluble human prolactin | 1 . . . 311 | 311/336 (92%) | 0.0 |
| | receptor clone F - Homo | 1 . . . 336 | 311/336 (92%) | |
| | sapiens, 349 aa. [US6083714- | | | |
| | A, 04 JUL. 2000] | | | |

[0463] In a BLAST search of public sequence datbases, the NOV18a protein was found to have homology to the proteins shown in the BLASTP data in Table 18D.

TABLE 18D
Public BLASTP Results for NOV18a

| | | NOV18a | Identities/ | |
|---|---|---|---|---|
| Protein | | Residues/ | Similarities for | |
| Accession | | Match | the Matched | Expect |
| Number | Protein/Organism/Length | Residues | Portion | Value |
| P16471 | Prolactin receptor precursor | 1 . . . 597 | 597/622 (95%) | 0.0 |
| | (PRL-R) - Homo sapiens | 1 . . . 622 | 597/622 (95%) | |
| | (Human), 622 aa. | | | |
| Q9N0J7 | Prolactin receptor | 1 . . . 597 | 531/622 (85%) | 0.0 |
| | precursor - Callithrix jacchus | 1 . . . 622 | 555/622 (88%) | |
| | (Common marmoset), 622 aa. | | | |
| P14787 | Prolactin receptor precursor | 1 . . . 597 | 450/624 (72%) | 0.0 |
| | (PRL-R) - Oryctolagus | 1 . . . 616 | 496/624 (79%) | |
| | cuniculus (Rabbit), 616 aa. | | | |
| Q9XS92 | Prolactin receptor | 1 . . . 597 | 407/625 (65%) | 0.0 |
| | precursor - Trichosurus | 1 . . . 625 | 476/625 (76%) | |
| | vulpecula (Brush-tailed | | | |
| | possum), 625 aa. | | | |
| A36116 | prolactin receptor 2 | 7 . . . 597 | 406/618 (65%) | 0.0 |
| | precursor - rat, 610 aa. | 3 . . . 610 | 472/618 (75%) | |

[0464] PFam analysis predicts that the NOV18a protein contains the domains shown in the Table 18E.

TABLE 18E
Domain Analysis of NOV18a

| | | Identities/ | |
|---|---|---|---|
| | | Similarities for | |
| Pfam | NOV18a Match | the Matched | Expect |
| Domain | Region | Region | Value |
| fn3 | 102 . . . 194 | 23/94 (24%) | 0.051 |
| | | 58/94 (62%) | |

### Example 19

[0465] The NOV19 clone was analyzed, and the nucleotide and encoded polypeptide sequences are shown in Table 19A.

TABLE 19A
NOV19 Sequence Analysis

| | |
|---|---|
| SEQ ID NO: 75 | 2221 bp |

| NOV19a, | AGCGGGCCGGGCGGCGGCGGGGAGATGCGGCTGCTGGCACTCGCGGCGGCCGCCCTGC | |
|---|---|---|
| CG173357-01 DNA | | |
| Sequence | TGGCGCGGGCTCCGGCTCCGGAGGTCTGTGCGGCCCTCTCTGTCACTGTGTCCCCGGG | |
| | GCCCGTGGTTGACTACCTGGAGGGGGAGAATGCCACTCTCCTCTGCCACGTCTCCCAG | |
| | AAAAGGCGGAAGGACAGCTTGCTGGCCGTGCGCTGGTTCTTTGCACACTCCTTCGACT | |
| | CCCAGGAGGCCTTGATGGTGAAGATGACCAAGCTCCGGGTGGTGCAGTACTATGGGAT | |
| | TTTCAGCCGCAGCGCCAAACGGCGGAGGCTCCGCCTGCTGGAGGAGCAGCGCGGGGCG | |
| | CTCTACAGGCTCTCCGTCTTGACACTGCACCCCTCCGATCGGGGCATTACGTCTGGCA | |
| | GAGTCCAGGAAATCAGCAGGCACAGGAACAAGTGGACGCCCTGGTCCGTTGGCTCCTC | |
| | AGCCACGGAATGAGAGTCATTTCCCTCAAGCTTCTGTAGGAGTCATCCTTTGAGAGAA | |
| | ACAAAAGAGACTTGGGCATTTTTTGAAGATCTCTATGTGTATGCTGTCCTCGTGTGCT | |
| | GCATGGGGATCCTCAGCATTCTGCTCTTCATGCTGGTCATCGTCTGGCAGTCTGTGTT | |
| | TAACAAGCGGAATCCAGAGTGAGACATTATTTGGTGTCATGCCCTCAGTATCAGCTCA | |
| | GGGGAGAGCTGTCACTAGCGTGACCAGCTTGGCCCCACTACAGCCCCAGGGAAGGGCG | |
| | AGGCAGAAGGAGAAGCCTGACATTCCTCCCGCAGTCCCTGCCAAAGCTCCGATACCCC | |
| | CCACGTTCCATAACCGAAGCTGCTGAACCACAGAGAAGGTGTCACGCTGCCAATCGAT | |
| | TGCTGAGGAAAACTTAACCTATGCCGAGCTGGAGCTGATCAGTCCCCACCGGGCTGCC | |
| | AAGGCGCCCCCACCAGCACTGTCTACGCCCAGATCCTCTTCGAGGAGAACGCAGCTGT | |
| | ACTACAGCGTCCACCTCCAGGTTCTATTTAATACCTGCCACCCAGTGATTTATGATGC | |
| | CTTGGAGACAAAGCCCTTATGTCTGTATTTTCACTCATGCCTTCTGAGTGGTGGGGAG | |
| | CCCCTTTTCAGCAGCATTCTGGGTGCCTTTGAAGAGGTACCGGCCTGCTCTCCCCAAA | |
| | AGAATCAGGGCCACAGCTCTTGACAGATCTCCCGGGACAAGATGCGCCTCGGTTTGAG | |
| | CCCTGAGCGTAAGCATTCTGATCCTGAGAGCAGCCAAGGAGATTTTCTGCTGAGCCAA | |
| | ACCCCTTCACATTTTTCTCCTCTTTCCCCAGGTTTTCTTTAAAATCGTTTTTAAATCT | |
| | TAATTTTACTCTCTACTCTTCCTGTATCCACGATACAAGCTCACAGTATATAGCTAGA | |
| | GGAAATGCCATTATGGACCCAACTGTAAGATGGCACATATGTTCGTTTTCCAAGGATC | |
| | AGATGGCATTGCAGGGCCACAGCCAACTGCTGATTGCCAGCACCACCTGAGATGGCAT | |
| | CTCTTGTTTTAAATACATGCACTAACCCTGAAGATTAAGGCCACAGGGGCAGACTGAC | |
| | TAGAGAAGTATAACGTCTGTCTCTGAATGCCATGGTGCCCACCTATGAGACCCTGAGG | |
| | CCGCAGACAAAGAAGAACACCATTCTAGAGGGCTTCCAGCCCTTTCACAAGGTGGACC | |
| | TGTACTGATAGAGAAACACACTCTCTAAGAAGTGCTTACTCACCCTTTTCCAAAGGAG | |
| | CACAGGTGTTGGCCATCAGAAGACACACTGGAGCGCATGGGCCTCTTCACTGTGTGCC | |
| | AAGCTCAGTCACCTCTGATTCAGCCCCTGAGGGTGTCTGCTGCCAGGTGCCCTCAGGG | |
| | TAGGAGAGTGGGAAGTACACGCCAAGCTGGAAAGTGTGTTCTGAAGACCCTCCTCTTG | |
| | CCAAGTGCCTTGCCCATTGCAACCTTGTGTGTGAATTCTAATGGGTTTGAATGGGGGT | |
| | CAGGGTGCATGGGGAAGTTGCTCTGTGGACCTTTGGGACACAGGAATCTTGGACTTAC | |
| | TGGCAGGGGATCCATTCTGAAAGCACCATCCTGTCAACTGTGTTATTGAGGACATTTC | |
| | TTGATGTGAGTATAGTCTGGGTGGCTATTTACTGCCCACTATAGAAATTGTTTGACTA | |
| | TGTAGTGGACCATGTATATATGATAATTATCTATTTTAACACAAAAAAAAAAAAAAAA | |
| | AAAAAAAGGGCCGCCGC | |
| | ORF Start: ATG at 25 | ORF Stop: TAG at 712 |

| | | |
|---|---|---|
| SEQ ID NO: 76 | 229 aa | MW at 26166.1kD |

| | |
|---|---|
| NOV19a, | MRLLALAAAALLARAPAPEVCAALNVTVSPGPVVDYLEGENATLLCHVSQKRRKDSLL |
| CG173357-01 | |
| Protein Sequence | AVRWFFAHSFDSQEALMVKMTKLRWQYYGNFSRSAKRRRLRLLEEQRGALYRLLSVLT |
| | LQPSDQGHYVCRVQEISRHRNKWTAWSNGSSATEMRVISLKASEESSFEKTKETWAFF |
| | EDLYVYAVLVCCMGILSILLFMLVIVWQSVFNKRKSRVRHYLVKCPQNSSGESCH |

[0466] Further analysis of the NOV19a protein yielded the following properties shown in Table 19B.

TABLE 19B
Protein Sequence Properties NOV19a

| | |
|---|---|
| PSort | 0.4600 probability located in plasma membrane; |
| analysis: | 0.2000 probability located in lysosome (membrane); |
| | 0.1000 probability located in endoplasmic reticulum |
| | (membrane); 0.1000 probability located in endoplasmic |
| | reticulum (lumen) |
| SignalP | Cleavage site between residues 23 and 24 |
| analysis: | |

[0467] A search of the NOV19a protein against the Geneseq database, a proprietary database that contains sequences published in patents and patent publication, yielded several homologous proteins shown in Table 19C.

TABLE 19C
Geneseq Results for NOV19a

| | | NOV19a | Identities/ | |
|---|---|---|---|---|
| | | Residues/ | Similarities for | |
| Geneseq | Protein/Organism/Length | Match | the Matched | Expect |
| Identifier | [Patent #, Date] | Residues | Region | Value |
| AAU18012 | Human immunoglobulin | 52 . . . 229 | 178/178 (100%) | e−100 |
| | polypeptide SEQ ID No 157 - | 17 . . . 194 | 178/178 (100%) | |
| | Homo sapiens, 194 aa. | | | |
| | [WO20015531S-A2, 02 AUG. | | | |
| | 2001] | | | |
| AAU18070 | Human immunoglobulin | 14 . . . 190 | 174/177 (98%) | 2e−97 |
| | polypeptide SEQ ID No 215 - | 6 . . . 182 | 174/177 (98%) | |
| | Homo sapiens, 203 aa. | | | |
| | [WO200155315-A2, 02 AUG. | | | |
| | 2001] | | | |
| ABB10520 | Human cDNA SEQ ID NO: 828 - | 14 . . . 190 | 174/177 (98%) | 2e−97 |
| | Homo sapiens, 203 aa. | 6 . . . 182 | 174/177 (98%) | |
| | [WO200154474-A2, 02 AUG. | | | |
| | 2001] | | | |
| ABB03217 | Human musculoskeletal system | 14 . . . 190 | 174/177 (98%) | 2e−97 |
| | related polypeptide SEQ ID | 6 . . . 182 | 174/177 (98%) | |
| | NO 1164 - Homo sapiens, 203 | | | |
| | aa. [WO200155367-A1, 02 AUG. | | | |
| | 2001] | | | |
| ABB72358 | Murine protein isolated from | 1 . . . 207 | 170/207 (82%) | 1e−92 |
| | skin cells SEQ ID NO: 682 - | 3 . . . 206 | 185/207 (89%) | |
| | Mus sp, 210 aa. | | | |
| | [WO200190357-A1, 29 NOV. | | | |
| | 2001] | | | |

[0468] In a BLAST search of public sequence datbases, the NOV19a protein was found to have homology to the proteins shown in the BLASTP data in Table 19D.

TABLE 19D
Public BLASTP Results for NOV19a

| | | NOV19a | Identities/ | |
|---|---|---|---|---|
| Protein | | Residues/ | Similarities for | |
| Accession | | Match | the Matched | Expect |
| Number | Protein/Organism/Length | Residues | Portion | Value |
| Q96MX7 | CDNA FLJ31737 fis, clone | 1 . . . 164 | 155/164 (94%) | 1e−83 |
| | NT2RI2007084 - Homo sapiens | 1 . . . 164 | 157/164 (95%) | |
| | (Human), 191 aa. | | | |
| Q93033 | Leukocyte surface protein - | 38 . . . 226 | 47/189 (24%) | 3e−04 |
| | Homo sapiens (Human), 1021 | 426 . . . 602 | 82/189 (42%) | |
| | aa. | | | |
| AAC72013 | IG-LIKE MEMBRANE PROTEIN - | 37 . . . 131 | 27/95 (28%) | 4e−04 |
| | Homo sapiens (Human), 1215 | 712 . . . 806 | 42/95 (43%) | |
| | aa. | | | |
| O75054 | KIAA0466 protein - Homo | 37 . . . 131 | 27/95 (28%) | 4e−04 |
| | sapiens (Human), 1214 aa | 712 . . . 806 | 42/95 (43%) | |
| | (fragment). | | | |
| I39207 | leukocyte surface protein | 38 . . . 226 | 47/189 (24%) | 0.002 |
| | V7 - human, 1021 aa. | 426 . . . 602 | 81/189 (41%) | |

[0469] PFam analysis predicts that the NOV19a protein contains the domains shown in the Table 19E.

TABLE 19E
Domain Analysis of NOV19a

| | | Identities/ | |
|---|---|---|---|
| | | Similarities for | |
| Pfam | NOV19a Match | the Matched | Expect |
| Domain | Region | Region | Value |
| ig | 39 . . . 129 | 16/92 (17%) | 2.7e−05 |
| | | 57/92 (62%) | |

### Example 20

[0470] The NOV20 clone was analyzed, and the nucleotide and encoded polypeptide sequences are shown in Table 20A.

TABLE 20A
NOV20 Sequence Analysis

| | |
|---|---|
| SEQ ID NO: 77 | 704 bp |

| NOV20a, | ATGGGCGACTGGAGCTTTCTGGGAAGACTCTTAGAAAATGCACAGGAGCACTCCACGG | |
|---|---|---|
| CG50387-01 DNA | | |
| Sequence | TCATCGGCAAGGTTTGGCTGACCGTGCTGTTCATCTTCCGCATCTTGGTGCTGGGGGC | |
| | CGCGGCGGAGGACGTGTGGGGCGATGAGCAGTCAGACTTCACCTGCGACACCCGGCCG | |
| | CCCGCCGTTGCCATCGGGTTCCCACCCTACTATGCGCACACCGCTGCGCCCCTGGGAC | |
| | AGGCCCGCGCCGTGGGCTACCCCGGGGCCCCGCCACCAGCCGCGGACTTCGGCTTGCT | |
| | AGCCCTGACCGAGGCGCGCGGAAAGGGCCAGTCCGCCAAGCTCTACTGCGGCCACCAC | |
| | CACCTGCTGATGACTGAGCAGAACTGGGCCAACCAGGCGGCCGAGCGGCAGCCCCCGG | |
| | CACTCAAGGCTTACCCGGCAGCGTCCACGCCTGCAGCCCCCAGCCCCGTCGGCAGCAG | |
| | CTCCCCGCCACTCGCGCACGAGGCTGAGGCGGGCGCGGCGCCCCTGCTGCTGGATGGG | |
| | AGCGGCAGCAGTCTGGAGGGGAGCGCCCTGGCAGGGACCCCCGAGGAGGAGGAGCAGG | |
| | CCGTGACCACCGCGGCCCAGATGCACCAGCCGCCCTTGCCCCTCGGAGACCCAGGTCG | |
| | GGCCAGCAAGGCCAGCAGGGCCAGCAGCGGGCGGGCCAGACCGGAGGACTTGGCCATC | |
| | TAGTGCCC | |
| | ORF Start: ATG at 1 | ORF Stop: TAG at 697 |

| | | |
|---|---|---|
| SEQ ID NO: 78 | 232 aa | MW at 24185.8kD |

| NOV20a | MGDWSFLGRLLENAQEHSTVIGKVWLTVLFIFRTLVLGAAAEDVWGDEQSDFTCNTRP | |
|---|---|---|
| C050387-01 | | |
| Protein Sequence | PAVAIGFPPYYAHTAAPLGQARAVGYPGAPPPAADFKMLALTEARGKGQSAKLYNGHH | |
| | HLLMTEQNWANQAAERQPPALKAYPAASTPAAPSPVGSSSPPLAHEAEAGAAPLLLDG | |
| | SGSSLEGSALAGTPEEEEQAVTTAAQMHQPPLPLGDPGRASKASRASSGRARPEDLAI | |
| | SEQ ID NO: 79 | 1308 bp |

| NOV20b, | ATGGGCGACTGGAGCTTTCTGGGAAGACTCTTAGAAAATGCACAGGAGCACTCCACGG | |
|---|---|---|
| CG50387-03 DNA | | |
| Sequence | TCATCGGCAAGGTTTGGCTGACCGTGCTGTTCATCTTCCGCATTTTGGTGCTGGGGGC | |
| | CGCGGCCGAGGACGTGTGGGGCGATGAGCAGTCAGACTTCACCTGCGACACCCAGCAG | |
| | CCGGGCTGCGAGAACGTCTGCTACGACAGGGCCTTCCCCATCTCCCACATCCGCTTCT | |
| | GGGCGCTGCAGATCATCTTCGTGTCCACGCCCACCCTCATCTACCTGGGCCACGTGCT | |
| | GCACATCGTGCGCATGGAGGAGAAGAAGAAAGAGAGGGAGGAGGAGGAGCAGCTGTCG | |
| | AGAGAGAGCCCCAGCCCCAAGGAGCCACCGCAGGACAATCCCTCGTCGCGGGACGACC | |
| | GCGGCAGGGTGCGCATGGCCGGCGCGCTGCTGCGGACCTACGTCTTCTACATCATCTT | |
| | CAAGACGCTGTTCGAGGTGGGCTTCATCGCCGGCCAGTACTTTCTGTACGGCTTCGAG | |
| | CTGAAGCCGCTCTACCGCTGCGACCGCTGGCCCTGCCCCAACACGGTGGACTGCTTCA | |
| | TCTCCAGGCCCACGGAGAAGACCATCTTCATCATCTTCATGCTGGCGGTGGCCTGCGC | |
| | GTCACTGCTGCTCGACATGCTGGAGATATACCACCTGGGCTGGAAGCGCTCATGGCAG | |
| | GGCGTGACCAGCCGCCTCGGCCCGGACGCCTCCGAGGCCCCGCTGGGGACAGCCGATC | |
| | CCCCGCCCCTGCCCCCCAGCTCCCGGCCGCCCGCCGTTGCCATCGGGTTCCCCCCCTA | |
| | CTATGCGCACACCGCTGCGCCCCTGGGACAGGCCCGCGCCGTGGGCTACCCCGGGGCC | |
| | CCGCCACCAGCCGCGGACTTCAAAATGCTAGCCCTGACCGAGGCGCGCGGTCAGGGCC | |
| | AGTCCGCCAAGCTCTACAACGGCCACCACCACCTGCTGATGACTGAGCAGGCGTGGGC | |
| | CAACCAGGCGGCCGAGCGGCAGCCCCCGGCGCTCAAGGCTTACCCGGCAOCGTCCACG | |
| | CCTGCAGCCCCCAGCCCCGTCGGCAGCAGCTCCCCGCCACTCGCGCACGAGGCTGAGG | |
| | CGGGCGCGGCGCCCCTGCTGCTGGATGGGAGCGGCAGCAGTCTGGAGGGGAGCGCCCT | |
| | GGCAGGGACCCCCGAGGAGGAGGAGCAGGCCGTGACCACCGCGGCCCAGATGCACCAG | |
| | CCGCCCTTGCCCCTCGGAGACCCAGGTCGGGCCAGCTAGGCCAGCAGGGCCAGCAGCG | |
| | GGCGGGCCAGACCGGAGGACTTGGCCATCTAG | |
| | ORF Start: ATG at 1 | ORF Stop: TAG at 1306 |

| | | |
|---|---|---|
| SEQ ID NO: 80 | 435 aa | MW at 47427.5kD |

| NOV20b, | MGDWSFLGRLLENAQEHSTVIGKVWLTVLFIFRILVLGAAAEDVWGDEQSDFTCNTQQ | |
|---|---|---|
| CG50387-03 | | |
| Protein Sequence | PGCENVCYDRAFPISHIRFWALQIIFVSTPTLIYLGHVLHIVGAEEKKKEREEEEQLK | |
| | RESPSPKEPPQDNPSSRDDRGRVRMAGALLRTYVFNIIFKTLFEVGFIAGQYFLYGFE | |
| | LKPLYRCDRWPCPNTVDCFISRPTEKTIFIIFMLAVACASLLLNMLEIYHLGWKQGKQ | |
| | GVTSRLGPDASEAPLGTADPPPLPPSSRPPAVAIGFPPYYAGTGAPLGQKLIVGYPGA | |
| | PPPADFKMLALTEARGKGQSAKLYNGHHHLLMTEQNWKMQEIMERQPPALAGTYPHST | |
| | PAPSPVGSSSPPLAHEAEAGAAPLLLDGSGSSLEGSTRAGTPEEEEQAVTTKREQMHQ | |
| | PPLPLGDPGRASKASRASSGRARPEDLAI | |
| | SEQ ID NO: 81 | 954 bp |

| NOV20c, | ATGGGCGACTGGAGCTTTCTGGGAAGACTCTTAGCGGATGCACAGGAGCACTCCACGG | |
|---|---|---|
| CG50387-02 DNA | | |
| Sequence | TCATCGGCAAGGTTTGGCTGACCGTGCTGTTCATCTTCCGCATTTTGGTGCTGGGGGC | |
| | CGCGGCCGAGGACGTGTGGGGCGATGAGCAGTCAGACTTCACCTGCGACACCCAGCAG | |
| | CCGGGCTGCGAGAACGTCTGCTACGACAGGGCCTTCCCCATCTCCCACATCCGCTTCT | |
| | GGGCGCTGCAGATCATCTTCGTGTCCACCCCCACCCTCATCTACCTGGGCCACGTGCT | |
| | GCACATCGTGCGCATGGAGGAGAAGAAGAAAGAGAGGGAGGAGGAGGAGCAGCTGAGG | |
| | AGAGAGCCCCAGCCCCAAGGAGCCACCGCAGGACTCCCTCGTCGCGGGACGACCGCGG | |
| | CAGGGTGCGCATGGCCGGCGCGCTGCTGCGGACCTACGTCTTCCATCATCTTCAAGAC | |
| | GCTGTTCGAGGTGGGCTTCATCGCCGGCCAGTACTTTCTGTACGGCTTCGAGCTGAAG | |
| | CCGCTCTACCGCTGCGACCGCTGGCCCTGCCCCCACGGTGGACTGCTTCATCTCCAGG | |
| | CCCACGGAGAAGACCATCTTCATCATCTTCATGCTGGCGGTGGCCTGCGCGTCACTGC | |
| | TGCTCCATGCTGGAGATATACCACCTGGGCTGGGGCTCGCAGGGCGTGACCAGCCGCC | |
| | TCGGCCCGGACGCCTCCGAGGCCCCGCTGGGGACAGCCCATCCCCCGCCCCTGCTGCT | |
| | GGATGGGAGCGGCAGCAGTCTGGAGGGGAGCGCCCTGGCAGGGACCCCCGAGGAGGAG | |
| | GAGCAGGCCGTGACCACCGCGGCCCAGATGCACCAGCCGCCCTTGCCCCTCGGAGACC | |
| | CAGGTCGGGCCAGCAAGGCCAGCAGGGCCAGCAGCGGGCGGGCCAGACCGGAGGACTT | |
| | GGCCATCTAG | |
| | ORF Start: ATG at 1 | ORF Stop: TAG at 952 |

| | | |
|---|---|---|
| SEQ ID NO: 82 | 317 aa | MW at 35397.1kD |

| | |
|---|---|
| NOV20c, | MGDWSFLGRLLENAQEHSTVIGKVWLTVLFIFRILVLGAAAEDVWGDEQSDFTCNTQQ |
| CG50387-02 | |
| Protein Sequence | PGCENVCYDRAFPISHIRFWALQIIFVSTPTLIYLGHVLHIVRMEEKKKEREEEEQLK |
| | RESPSPKEPPQDNPSSRDDRGRVRMAGALLRTYVFNIIFKTLFEVGFIAGQYFLYGFE |
| | LKPLYRCDRWPCPNTVDCFISRPTEKTIFIIFMLAVACASLLLNMLEIYHLGWKKLKQ |
| | GVTSRLGPDASEAPLGTADPPPLLLDGSGSSLEGSALAGTPEEEEQAVTTTAQMHQPP |
| | LPLGDPGRASKASRASSGRARPEDLAI |

[0471] Sequence comparison of the above protein sequences yields the following sequence relationships shown in Table 20B.

TABLE 20B
Comparison of NOV20a against NOV20b and NOV20c.

| | | Identities/ |
|---|---|---|
| | | Similarities for |
| Protein | NOV20a Residues/ | the Matched |
| Sequence | Match Residues | Region |
| NOV20b | 55 . . . 232 | 176/178 (98%) |
| | 258 . . . 435 | 178/178 (99%) |
| NOV20C | 147 . . . 232 | 69/86 (80%) |
| | 242 . . . 317 | 74/86 (85%) |

[0472] Further analysis of the NOV20a protein yielded the following properties shown in Table 20C.

TABLE 20C
Protein Sequence Properties NOV20a

| | |
|---|---|
| PSort | 0.7900 probability located in plasma membrane; 0.3748 |
| analysis: | probability located in microbody (peroxisome); 0.3000 |
| | probability located in Golgi body; 0.2000 probability located |
| | in endoplasmic reticulum (membrane) |
| SignalP | Cleavage site between residues 42 and 43 |
| analysis: | |

[0473] A search of the NOV20a protein against the Geneseq database, a proprietary database that contains sequences published in patents and patent publication, yielded several homologous proteins shown in Table 20D.

TABLE 20D
Geneseq Results for NOV20a

| | | NOV20a | Identities/ | |
|---|---|---|---|---|
| | | Residues/ | Similarities for | |
| Geneseq | Protein/Organism/Length | Match | the Matched | Expect |
| Identifier | [Patent #, Date] | Residues | Region | Value |
| AAW49009 | Mouse alpha 3 connexin | 58 . . . 232 | 88/175 (50%) | 2e−38 |
| | protein - Mus sp, 417 aa. | 267 . . . 417 | 109/175 (62%) | |
| | [WO9830677-A1, 16 JUL. 1998] | | | |
| AAW23968 | Connexin protein Cx40 - Homo | 1 . . . 59 | 43/59 (72%) | 4e−20 |
| | sapiens, 358 aa. [WO9802150- | 1 . . . 59 | 48/59 (80%) | |
| | A1, 22 JAN. 1998] | | | |
| AAG00107 | Human secreted protein, SEQ | 1 . . . 59 | 43/59 (72%) | 7e−20 |
| | ID NO: 4188 - Homo sapiens, | 1 . . . 59 | 48/59 (80%) | |
| | 83 aa. [EP1033401-A2, 06 SEP. | | | |
| | 2000] | | | |
| AAB58122 | Lung cancer associated | 1 . . . 59 | 43/59 (72%) | 7e−20 |
| | polypeptide sequence SEQ ID | 48 . . . 106 | 48/59 (80%) | |
| | 460 - Homo sapiens, 124 aa. | | | |
| | [WO200055180-A2, 21 SEP. 2000] | | | |
| ABB05038 | Human NOV3b protein SEQ ID | 1 . . . 59 | 40/59 (67%) | 4e−19 |
| | NO: 12 - Homo sapiens, 543 aa. | 1 . . . 59 | 47/59 (78%) | |
| | [WO200190155-A2, 29 NOV. 2001] | | | |

[0474] In a BLAST search of public sequence datbases, the NOV20a protein was found to have homology to the proteins shown in the BLASTP data in Table 20E.

TABLE 20E
Public BLASTP Results for NOV20a

| | | NOV20a | Identities/ | |
|---|---|---|---|---|
| Protein | | Residues/ | Similarities for | |
| Accession | | Match | the Matched | Expect |
| Number | Protein/Organism/Length | Residues | Portion | Value |
| Q9Y6H8 | Gap junction alpha-3 protein | 55 . . . 232 | 176/178 (98%) | 8e−99 |
| | (Connexin 46) (Cx46) - Homo | 257 . . . 434 | 178/178 (99%) | |
| | sapiens (Human), 434 aa. | | | |
| Q64448 | Gap junction alpha-3 protein | 58 . . . 232 | 88/175 (50%) | 6e−38 |
| | (Connexin 46) (Cx46) - Mus | 266 . . . 416 | 109/175 (62%) | |
| | musculus (Mouse), 416 aa. | | | |
| S25764 | connexin 46 - rat, 416 aa. | 55 . . . 232 | 90/178 (50%) | 2e−35 |
| | | 264 . . . 416 | 107/178 (59%) | |
| P29414 | Gap junction alpha-3 protein | 55 . . . 232 | 90/178 (50%) | 2e−35 |
| | (Connexin 46) (Cx46) - | 263 . . . 415 | 107/178 (59%) | |
| | Rattus norvegicus (Rat), 415 | | | |
| | aa. | | | |
| A45338 | connexin-56 - chicken, 510 | 1 . . . 59 | 56/59 (94%) | 1e−26 |
| | aa. | 1 . . . 59 | 58/59 (97%) | |

[0475] PFam analysis predicts that the NOV20a protein contains the domains shown in the Table 20F.

TABLE 20F
Domain Analysis of NOV20a

| | | Identities/ | |
|---|---|---|---|
| | | Similarities for | |
| Pfam | NOV20a | the Matched | Expect |
| Domain | Match Region | Region | Value |
| connexin | 1 . . . 118 | 65/247 (26%) | 1.4e−09 |
| | | 89/247 (36%) | |

### Example 21

[0476] The NOV21 clone was analyzed, and the nucleotide and encoded polypeptide sequences are shown in Table 21A.

TABLE 21A
NOV21 Sequence Analysis

| | |
|---|---|
| SEQ ID NO: 83 | 1306 bp |

| | |
|---|---|
| NOV21a, | CTCACTATAGGGCTCGAGCGGGCTTGGGCCCCCCGGGGGCCAAAGGGTTCCCCAAGAA |
| CG52113-01 DNA | |
| Sequence | CCAGAGGAGAAGGCCACCCCGCCTGGAGGCACAGGCCATGAGGGGCTCTCAGGAGGTG |
| | CTGCTGATGTGGCTTCTGGTGTTGGCAGTGGGCGGCACAGAGCACGCCTACCGGCCCG |
| | GCCGTACGGTGTGTGCTGTCCGGGCTCACGGGGACCCTGTCTCCGAGTCGTTCGTCCA |
| | GCGTGTGTACCAGCCCTTCCTCACCACCTGCGACGGGCACCGGGCCTGCAGCACCTAC |
| | CGAACCATCTATAGGACCGCCTACCGCCGCAGCCCTGGGCTGGCCCCTGCCAGGCCTC |
| | GCTACGCGTGCTGCCCCGGCTGGAAGAGGACCAGCGGGCTTCCTGGGGCCTGTGGAGC |
| | AGCAATATGCCAGCCGCCATGCCGGAACGGAGCGAGCTGTGTCCACCCTGGCCGCTGC |
| | CGCTGCCCTGCAGGATGGCGGGGTGACACTTCCCAGTCAGATGTCGATGAATGCAGTG |
| | CTAGGAGGGCCGGCTGTCCCCAGCGCTGCGTCAACACCGCCGGCAGTTACTGGTGCCA |
| | GTGTTGGGAGGGGCACAGCCTGTCTGCAGACGGTACACTCTGTGTGCCCAAGGGAGGG |
| | CCCCCCAGGGTGGCCCCCAACCCGACAGGAGTGGACAGTGCAATGAAGGAAGAAGTGC |
| | AGAGGCTGCAGTCCAGGGTGGACCTGCTGGAGGAGAAGCTGCAGCTGGTGCTGGCCCC |
| | ACTGCACAGCCTGGCCTCGCAGGCACTGGAGCATGGGCTCCCGGACCCCGGCAGCCTC |
| | CTGGTGCACTCCTTCCAGCAGCTCGGCCGCATCGACTCCCTGAGCGAGCAGATTTCCT |
| | TCCTGGAGGAGCAGCTGGGGTCCTGCTCCTGCAAGAAAGACTCGTGACTGCCCAGCGC |
| | CCCAGGCTGGACTTGAGCCCCTCACGCCGCCCTGCAGCCCCCATGCCCCTGCCCAACA |
| | TGCTGGGGGTCCAGAAGCCACCTCGGGGTGACTGAGCGGAAAGCCAGGCAGGGCCTTC |
| | CTCCTCTTCCTCCTCCCCTTCCTCGGGAGGCTCCCCAGACCCTGGCATGGGATGGGCT |
| | GGGATCTTCTCTGTGAATCCACCCCTGGCTACCCCCACCCTGGCTACCCCAACGGCAT |
| | CCCAAGGCCAGGTGGGCCCTCAGCTGAGGGAAGGTACGAGCTCCCTGCTGGAGCCTGG |
| | GACCCATGGCACAGGCCAGGCAGCCCGGAGGCTGGGTGGGGCCTCAGTGGGGGCTGCT |
| | GCCTGACCCCCAGCACAATAAAAATGAAAC |

| | |
|---|---|
| ORF Start: ATG at 96 | ORF Stop: TGA at 915 |

| | | |
|---|---|---|
| SEQ ID NO: 84 | 273 aa | MW at 29617.4 kD |

| | |
|---|---|
| NOV21a, | MRGSQEVLLMWLLVLAVGGTEHAYRPGRRVCAVRAHGDPVSESFVQRVYQPFLTTCDG |
| CG52113-01 | |
| Protein Sequence | HRACSTYRTIYRTAYRRSPGLAPARPRYACCPGWKRTSGLPGACGAAICQPPCRNGGS |
| | CVQPGRCRCPAGWRGDTCQSDVDECSARRGCCPQRCVNTAGSYWCQCWEGHSLSADGT |
| | LCVPKGGPPRVAPNPTGVDSAMKEEVQRLQSRVDLLEEKLQLVLAPLHSLASQALEHG |
| | LPDPGSLLVHSFQQLCRIDSLSEQISFLEEQLGSCSCKKDS |

| | |
|---|---|
| SEQ ID NO: 85 | 1307 bp |

| | |
|---|---|
| NOV21b, | CCAAGCTGGCCCTGCACGGCTGCAAGGGAGGCTCCTGTGGACAGGCCAGGCAGGTGGG |
| CG52113-06 DNA | |
| Sequence | CCTCAGCAGGTGCCTCCAGGCGGCCAGTGGGCCTGAGGCCCCAGCAAGGGCTAGGCTC |
| | CATCTCCAGTCCCAGGACACAGCAGCGGCCACCATGGCCACGCCTGGGCTCCAGCAGC |
| | ATCAGCAGCCCCCAGGACCGGGGAGGCACAGGTGGCCCCCACCACCCGGAGGAGCAGC |
| | TCCTCCCCCTGTCCGGGGGATGACTGATTCTCCTCCGCCAGCCGTAGGGTGTGTGCTG |
| | TCCGGGCTCACGGGGACCCTGTCTCCGAGTCGTTCGTGCAGCGTGTGTACCACCCCTT |
| | CCTCACCACCTGCGACGGGCACCGGGCCTGCAGCACCTACCGCAATATGCCAGCCGCC |
| | ATGCCGGAACGGAGGGAGCTGTGTCCAGCCTGGCCGCTGCCGCTGCCCTGCAGGATGG |
| | CGGGGTGACACTTGCCAGTCAGATGTGGATGAATGCAGTGCTAGGAGGGGCGGCTGTC |
| | CCCAGCGCTGCGTCAACACCGCCGGCAGTTACTGGTGCCAGTGTTGGGAGGGGCACAG |
| | CCTGTCTGCAGACGGTACACTCTGTGTGCCCAAGGGAGGGCCCCCCAGGGTGGCCCCC |
| | AACCCGACAGGAGTGGACAGTGCAATGAAGGAAGAAGTGCAGAGGCTGCAGTCCAGGG |
| | TGGACCTGCTGGAGGAGAAGCTGCAGCTGGTGCTGGCCCCACTGCACAGCCTGGCCTC |
| | GCAGGCACTGGAGCATGGGCTCCCGGACCCCGGCAGCCTCCTGGTGCACTCCTTCCAG |
| | CAGCTCGGCCGCATCGACTCCCTGAGCGAGCAGATTTCCTTCCTGGAGGAGCAGCTGG |
| | GGTCCTGCTCCTGCAAGAAAGACTCGTGACTGCCCAGCGCCCCAGGCTGGACTGAGCC |
| | CCTCACGCCGCCCTGCAGCCCCCATGCCCCTGCCCAACATGCTGCGGGTCCAGAAGCC |
| | ACCTCGGCGTGACTGAGCGGAAGGCCAGGCAGCGCCTTCCTCCTCTTCCTCCTCCCCT |
| | TCCTCGGGAGGCTCCCCAGACCCTGGCATGGGATGGGCTGGGATCTTCTCTGTGAATC |
| | CACCCCTGGCTACCCCCACCCTGGTTACCCCAACGGCATCCCAAGGCCAGGTGGGCCC |
| | TCAGCTGAGGGAAGGTACGAGCTCCCTGCTGGAGCCTGGGACCCATGGCACAGGCCAG |
| | GCAGCCCGGAGGCTGGGTGGGGCCTCAGTGGGGGCTGCTGCCTGACCCCCAGCACAAT |
| | AAAAATGAAACGTGAAAAAAAAAAAAAAAAA |

| | |
|---|---|
| ORF Start: ATG at 150 | ORF Stop: TGA at 897 |

| | | |
|---|---|---|
| SEQ ID NO: 86 | 249 aa | MW at 25902.0 kD |

| | |
|---|---|
| NOV21b, | MATPGLQQHQQPPGPGRhRWPPPPGGAAPAPVRGMTDSPPPAVGCVLSGLTGTLSPSR |
| CG52113-06 | |
| | SCSVCTSPSSPPATGTGPAAPTAICQPPCRNGGSCVQPGRCRCPAGWRGDTCQSDVDE |
| Protein Sequence | |
| | CSARRGGCPQRCVNTAGSYWCQCWEGHSLSADGTLCVPKGGPPRVAPNPTGVDSAMKE |
| | EVQRLQSRVDLLEEKLQLVLAPLHSLASQALEHGLPDPGSLLVHSFQQLCRIDSLSEQ |
| | ISFLEEQLGSCSCKKDS |

| | |
|---|---|
| SEQ ID NO: 87 | 841 bp |

| | |
|---|---|
| NOV21c, | CACCGGATCCACCATGAGGGGCTCTCAGGAGGTGCTGCTGATGTGGCTTCTGGTGTTG |
| 274054261 DNA | |
| Sequence | GCAGTGGGCGGCACAGAGCACGCCTACCGGCCCGGCCGTAGGGTGTGTGCTGTCCGGG |
| | CTCACGGGGACCCTGTCTCCGAGTCGTTCGTGCAGCGTGTGTACCAGCCCTTCCTCAC |
| | CACCTGCGACGGGCACCGGGCCTGCAGCACCTACCGAACCATCTATAGGACCGCCTAC |
| | CGCCGCAGCCCTGGGCTGGCCCCTGCCAGGCCTCGCTACGCGTGCTGCCCCGGCTGGA |
| | AGAGGACCAGCGGGCTTCCTGGGGCCTGTCGAGCAGCAATATGCCAGCCGCCATGCCG |
| | GAACGGAGGGAGCTGTGTCCAGCCTGGCCGCTGCCGCTGCCCTGCAGGATGGCGGCGT |
| | GACACTTGCCAGTCACATGTGGATGAATGCAGTGCTAGGAGGGGCCCCTCTCCCCAGC |
| | GCTGCGTCAACACCGCCGGCAGTTACTGGTGCCAGTGTTGGGAGGGGCACAGCCTGTC |
| | TGCAGACGGTACACTCTGTGTGCCCAAGGGAGGGCCCCCCAGGGTGGCCCCCAACCCG |
| | ACAGGAGTGGACAGTGCAATGAAGGAAGAAGTGCAGAGGCTGCAGTCCACGGTGGACC |
| | TGCTGGAGGAGAAGCTGCAGCTGGTGCTGGCCCCACTGCACAGCCTGGCCTCGCAGGC |
| | ACTGGAGCATGGGCTCCCGGACCCCGGCAGCCTCCTGGTCCACTCCTTCCAGCAGCTC |
| | CGCCGCATCGACTCCCTGAGCGAGCAGATTTCCTTCCTGGAGGAGCAGCTGGGGTCCT |
| | GCTCCTGCAAGAAAGACTCGGTCGACGGC |

| | |
|---|---|
| ORF Start: at 2 | ORF Stop: end of sequence |

| | | |
|---|---|---|
| SEQ ID NO: 88 | 280 aa | MW at 30235.0 kD |

| | |
|---|---|
| NOV21 c, | TGSTMRGSQEVLLMWLLVLAVGGTEHAYRPGRRVCAVRAHGDPVSESFVQRVYQPFLT |
| 274054261 | |
| Protein Sequence | TCDGHRACSTYRTIYRTAYRRSPGLAPARPRYACCPGWKRTSGLPGACGAAICQPPCR |
| | NGGSCVQPGRCRCPAGWRGDTCQSDVDECSARRGGCPQRCVNTAGSYWCQCWEGHSLS |
| | ADGTLCVPKGGPPRVAPNPTGVDSAMKEEVQRLQSRVDLLEEKLQLVLAPLHSLASQA |
| | LEHGLPDPGSLLVHSFQQLGRIDSLSEQISFLEEQLGSCSCKKDSVDG |

| | |
|---|---|
| SEQ ID NO: 89 | 769 bp |

| | |
|---|---|
| NOV21d, | CACCGGATCCTACCGGCCCGGCCGTAGGGTGTGTGCTGTCCGGGCTCACCGGGACCCT |
| 274054299 DNA | |
| Sequence | GTCTCCGAGTCGTTCGTGCAGCGTGTGTACCAGCCCTTCCTCACCACCTGCGACGGGC |
| | ACCGGGCCTGCAGCACCTACCGAACCATCTATAGGACCGCCTACCCCCGCAGCCCTGG |
| | GCTGGCCCCTGCCAGGCCTCGCTACGCGTGCTGCCCCGGCTGGAAGAGGACCAGCGGG |
| | CTTCCTGGGGCCTGTGGAGCAGCAATATGCCAGCCGCCATGCCGGAACGGAGGGAGCT |
| | CTGTCCAGCCTGGCCGCTGCCGCTGCCCTGCAGGATGGCCGGGTGACACTTGCCAGTC |
| | AGATGTGGATGAATGCAGTGCTAGGAGGGGCGGCTGTCCCCAGCGCTGCGTCAACACC |
| | GCCGCCAGTTACTGGTGCCAGTGTTGGGAGGGGCACAGCCTGTCTGCAGACGGTACAC |
| | TCTGTGTGCCCAAGGGAGGGCCCCCCAGGGTGCCCCCCAACCCGACAGGAGTGGACAC |
| | TGCAATGAAGGAAGAAGTGCAGAGGCTGCAGTCCAGGGTGGACCTGCTGGAGGAGAAG |
| | CGCAGCTGGTGCTGGCCCCACTGCACAGCCTGGCCTCGCAGGCACTGGAGCATGCGC |
| | TCCCGGACCCCGGCAGCCTCCTGGTCCACTCCTTCCAGCAGCTCGGCCGCATCGACTC |
| | CTGAGCGAGCAGATTTCCTTCCTGGAGGAGCAGCTGGGGTCCTGCTCCTGCAAGAAA |
| | ACTCGGTCGACCGC |

| | |
|---|---|
| ORF Start: at 2 | ORF Stop: end of sequence |

| | | |
|---|---|---|
| SEQ ID NO: 90 | 256 aa | MW at 27640.9 kD |

| | |
|---|---|
| NOV21d, | TGSYRPGRRVCAVRAHGDPVSESFVQRVYQPFLTTCDGHRACSTYRTIYRTAYRRSPG |
| 274054299 | |
| Protein Sequence | LAPARPRYACCPGWKRTSGLPGACGAAICQPPCRNGGSCVQPGRCRCPAGWRGDTCQS |
| | DVDECSARRGGCPQRCVNTAGSYWCQCWEGHSLSADGTLCVPKGGPPRVAPNPTGVDS |
| | AMKEEVQRLQSRVDLLEEKLQLVLAPLHSLASQALEHGLPDPGSLLVHSFQQLGRIDS |
| | LSEQISFLEEQLGSCSCKKDSVDG |

| | |
|---|---|
| SEQ ID NO: 91 | 841 bp |

| | |
|---|---|
| NOV21e, | CACCGGATCCACCATGAGGGGCTCTCAGGAGGTGCTGCTGATGTGGCTTCTGGTGTTG |
| 274054261 DNA | |
| Sequence | GCAGTGGCCGGCACAGAGCACGCCTACCGGCCCGGCCGTAGCGTGTGTGCTGTCCGGG |
| | CTCACGGGGACCCTGTCTCCGAGTCGTTCGTGCAGCGTGTGTACCAGCCCTTCCTCAC |
| | CACCTGCGACGGGCACCGGGCCTCCACCACCTACCGAACCATCTATAGGACCGCCTAC |
| | CGCCGCAGCCCTGGGCTGGCCCCTGCCAGGCCTCGCTACGCGTGCTGCCCCCGCTGGA |
| | AGAGGACCAGCGGGCTTCCTGGGGCCTGTGGAGCAGCAATATGCCAGCCGCCATGCCG |
| | GAACGGAGGGAGCTGTGTCCAGCCTGGCCGCTGCCGCTGCCCTCCAGGATGGCGGCGT |
| | GACACTTGCCAGTCAGATGTGGATGAATGCAGTGCTAGGAGGGGCGGCTGTCCCCAGC |
| | GCTGCGTCAACACCGCCGGCAGTTACTGGTGCCAGTGTTGGGAGGGGCACAGCCTGTC |
| | TGCAGACGGTACACTCTGTGTGCCCAAGGGAGGGCCCCCCAGGGTGGCCCCCAACCCG |
| | ACAGGAGTGGACAGTGCAATGAAGGAAGAAGTGCAGAGGCTGCAGTCCAGGGTGGACC |
| | TGCTGGAGGAGAAGCTGCAGCTGGTGCTGGCCCCACTGCACAGCCTGGCCTCGCAGGC |
| | ACTGGAGCATGGGCTCCCGGACCCCGGCAGCCTCCTGGTGCACTCCTTCCAGCAGCTC |
| | GGCCGCATCGACTCCCTGAGCGAGCAGATTTCCTTCCTGGAGGAGCAGCTGGGGTCCT |
| | GCTCCTGCAAGAAAGACTCGGTCGACGGC |

| | |
|---|---|
| ORF Start: at 2 | ORF Stop: end of sequence |

| | | |
|---|---|---|
| SEQ ID NO: 92 | 280 aa | MW at 30235.0 kD |

| | |
|---|---|
| NOV21e, | TGSTMRGSQEVLLMWLLVLAVGGTEHAYRPGRRVCAVRAHGDPVSESFVQRVYQPFLT |
| 274054261 | |
| Protein Sequence | TCDGHRACSTYRTIYRTAYRRSPGLAPARPRYACCPGWKRTSGLPGACCAAICQPPCR |
| | NGGSCVQPGRCRCPAGWRGDTCQSDVDECSARRGGCPQRCVNTAGSYWCQCWEGHSLS |
| | ADGTLCVPKGGPPRVAPNPTGVDSAMKEEVQRLQSRVDLLEEKLQLVLAPLHSLASQA |
| | LEHGLPDPGSLLVHSFQQLGRIDSLSEQISFLEEQLGSCSCKKDSVDG |

| | |
|---|---|
| SEQ ID NO: 93 | 769 bp |

| | |
|---|---|
| NOV21f, | CACCGGATCCTACCGGCCCGGCCGTAGGGTGTGTGCTGTCCGGGCTCACGGGGACCCT |
| 274054299 DNA | |
| Sequence | GTCTCCGAGTCGTTCGTGCAGCGTGTGTACCAGCCCTTCCTCACCACCTGCGACGGGC |
| | ACCGGGCCTGCAGCACCTACCGAACCATCTATAGGACCGCCTACCGCCGCAGCCCTGG |
| | GCTGGCCCCTGCCAGGCCTCGCTACGCGTGCTGCCCCGGCTGGAAGAGGACCACCGGG |
| | CTTCCTGGGGCCTGTGGAGCAGCAATATGCCAGCCGCCATGCCGGAACGGAGGGAGCT |
| | GTGTCCAGCCTGGCCGCTGCCGCTGCCCTGCAGGATGGCGGGGTGACACTTGCCAGTC |
| | AGATGTGGATGAATGCAGTCCTAGGAGGGGCGGCTGTCCCCAGCGCTGCGTCAACACC |
| | GCCGGCAGTTACTGGTGCCAGTGTTGGGAGGGGCACAGCCTGTCTGCAGACGGTACAC |
| | TCTGTGTGCCCAAGGGAGGGCCCCCCAGGGTGGCCCCCAACCCGACAGGAGTGGACAG |
| | TGCAATGAAGGAAGAAGTGCAGAGGCTGCAGTCCAGGGTGGACCTGCTGGAGGAGAAG |
| | CTGCAGCTGGTGCTGGCCCCACTGCACAGCCTGGCCTCGCAGGCACTGGAGCATGGGC |
| | TCCCGGACCCCGGCAGCCTCCTGGTGCACTCCTTCCAGCAGCTCGGCCGCATCGACTC |
| | CCTGAGCGAGCAGATTTCCTTCCTGGAGGAGCAGCTGGGGTCCTGCTCCTGCAAGAAA |
| | GACTCGGTCGACGGC |

| | |
|---|---|
| ORF Start: at 2 | ORF Stop: end of sequence |

| | | |
|---|---|---|
| SEQ ID NO: 94 | 256 aa | MW at 27640.9 kD |

| | |
|---|---|
| NOV21f, | TGSYRPGRRVCAVRAHGDPVSESFVQRVYQPFLTTCDGHRACSTYRTIYRTAYRRSPG |
| 274054299 | |
| Protein Sequence | LAPARPRYACCPGWKRTSGLPGACGAAICQPPCRNGGSCVQPGRCRCPAGWRGDTCQS |
| | DVDECSARRGGCPQRCVNTAGSYWCQCWEGHSLSADGTLCVPKGGPPRVAPNPTGVDS |
| | ANKEEVQRLQSRVDLLEEKLQLVLAPLHSLASQALEHGLPDPGSLLVHSFQQLGRIDS |
| | LSEQISFLEEQLGSCSCKKDSVDG |

| | |
|---|---|
| SEQ ID NO: 95 | 1475 bp |

| | |
|---|---|
| NOV21g, | GGGCCTCAGGAGGTGCCTCCAGGCGGCCAGTGGGCCTGAGGCCCCAGCAAGGGCTAGG |
| CG52113-02 DNA | |
| Sequence | GTCCATCTCCAGTCCCAGGACACAGCAGCGGCCACCATGGCCACGCCTGGGCTCCAGC |
| | AGCATCAGCAGCCCCCAGGACCGGGGAGGCACAGGTGGCCCCCACCACCCGGAGGAGC |
| | AGCTCCTGCCCCTGTCCGGGGGATGACTGATTCTCCTCCGCCAGGCCACCCAGAGGAG |
| | AAGGCCACCCCGCCTGGAGGCACAGGCCATGAGGGGCTCTCAGGAGGTGCTGCTGATG |
| | TGGCTTCTGGTGTTGGCAGTGGGCGGCACAGAGCACGCCTACCGGCCCGGCCGTAGGG |
| | TGTGTGCTGTCCGGGCTCACGGGGACCCTGTCTCCGAGTCGTTCGTGCAGCGTGTGTA |
| | CCAGCCCTTCCTCACCACCTGCGACGGGCACCGGGCCTGCAGCACCTACCGAACCATC |
| | TATAGGACCGCCTACCGCCGCAGCCCTGGGCTGGCCCCTGCCAGGCCTCGCTACGCGT |
| | GCTGCCCCGGCTGGAAGAGGACCAGCGGGCTTCCTGCGGCCTGTGGAGCAGCAATATG |
| | CCAGCCGCCATCCCGGAACGGAGGGAGCTGTGTCCAGCCTGGCCGCTGCCGCTGCCCT |
| | GCAGGATGGCGCGGTCACACTTGCCAGTCAGATGTGGATGAATGCAGTGCTAGGAGGG |
| | GCGGCTGTCCCCAGCGCTGCGTCAACACCGCCGGCAGTTACTGGTGCCAGTGTTGGGA |
| | GGGGCACAGCCTGTCTGCAGACGGTACACTCTGTGTGCCCAAGGGAGGGCCCCCCAGG |
| | GTGGCCCCCAACCCGACAGGAGTGGACACTGCAATGAAGGAAGAAGTGCAGAGGCTGC |
| | AGTCCAGGGTGGACCTGCTGGAGGAGAAGCTGCAGCTGGTGCTGGCCCCACTGCACAG |
| | CCTGGCCTCGCAGGCACTGGAGCATGGGCTCCCGGACCCCGGCAGCCTCCTGGTGCAC |
| | TCCTTCCAGCAGCTCGGCCGCATCGACTCCCTGAGCGAGCAGATTTCCTTCCTGGAGG |
| | AGCAGCTGGGGTCCTGCTCCTGCAAGAAAGACTCGTGACTGCCCAGCGCCCCAAGCTG |
| | GACTGAGCCCCTCACGCCGCCCTCCAGCCCCCATGCCCCTGCCCAACATGCTGCGGGT |
| | CCACAACCCACCTCGGGGTGACTGAGCGGAAGGCCAGGCAGGGCCTTCCTCCTCTTCC |
| | TCCTCCCCTTCCTCGGGAGGCTCCCCAGACCCTGGCATCCGATGGGCTGGGATCTTCT |
| | CTGTGAATCCACCCCTGGCTACCCCCACCCTGGCTACCCCAACGGCATCCCAAGGCCA |
| | GGTGGGCCCTCAGCTGAGGGAAGGTACGAGCTCCCTGCTGGAGCCTGGGACCCATGGC |
| | ACAGGCCAGGCAGCCCGGAGGCTGGGTGGCGCCTCAGTGGGGGCTGCTGCCTGACCCC |
| | CAGCACAATAAAAATGAAACGTGAC |

| | |
|---|---|
| ORF Start: at 201 | ORF Stop: TGA at 1080 |

| | | |
|---|---|---|
| SEQ ID NO: 96 | 293 aa | MW at 31986.2 kD |

| | |
|---|---|
| NOV21g, | LILLRQATQRRRPPRLEAQAMRGSQEVLLMWLLVLAVGGTEHAYRPGRRVCAVRAHGD |
| CG52113-02 | |
| Protein Sequence | PVSESFVQRVYQPFLTTCDGHRACSTYRTIYRTAYRRSPGLAPARPRYACCPGWKRTS |
| | GLPGACGAAICQPPCRNGGSCVQPGRCRCPAGWRGDTCQSDVDECSARRGGCPQRCVN |
| | TAGSYWCQCWEGHSLSADGTLCVPKGGPPRVAPNPTGVDSAMKEEVQRLQSRVDLLEE |
| | KLQLVLAPLHSLASQALEHGLPDPGSLLVHSFQQLGRIDSLSEQISFLEEQLGSCSCK |
| | KDS |

| | |
|---|---|
| SEQ ID NO: 97 | 1384 bp |

| | |
|---|---|
| NOV21h, | TTTTTTTTTTTTTTTTTTTTTTTTTTTTTTTTTTTTTTTTTTTTTTTTTTTTTTTTTT |
| CG52113-03 DNA | |
| Sequence | TTTTTTTTTTTTTTTTTTTTTTTTTTTTTTTTTTTTTTTTTTTTTTTTTTTTTTTTTT |
| | TTTTTTGTCACGTTTCATTTTTATTGTGCTGGGGGTCAGGCACCACCCCCCACTGAGG |
| | CCCCACCCAGCCTCCGGGCTGCCTGGCCTGTGCCATGGGTCCCAGGCTCCAGCAGGGA |
| | GCTCGTACCTTCCCTCAGCTGAGGCCCCACCTGGCCTTGGGATGCCGTTGGGGTAGCC |
| | AGGGTGGGGGTAGCCAGGGGTGCATTCACAGAGAAGATCCCAGCCCATCCCATGCCAG |
| | GGTCTGGGGAGCCTCCCGAGGAAGGGGAGGAGGAAGAGGAGGAAGGCCCTGCCTGGCC |
| | TTCCGCTCAGTCACCCCGAGGTGGCTTCTGGACCCCCAGCATGTTGGGCAGGGGCATG |
| | GGGGCTGCAGGGCGGCGTGAGGGGCTCAGTCCAGCCTGGGGCGCTGGGCAGTCACGAG |
| | TCTTTCTTGCAGGAGCAGGACCCCAGCTGCTCCTCCAGGAAGGAAATCTGCTCGCTCA |
| | GGGAGTCGATGCGGCCGAGCTGCTGGAAGGAGTGCACCAGGAGGCTGCCGGGGTCCGG |
| | GAGCCCATGCTCCAGTGCCTGCGAGGCCAGGCTGTGCAGTGGGGCCAGCACCAGCTGC |
| | AGCTTCTCCTCCAGCAGGTCCACCCTGGACTGCAGCCTCTGCACTTCTTCCTTCATTG |
| | CACTGTCCACTCCTGTCGGGTTGGGGGCCACCCTGGCGGGCCCTCCCTTGGGCACACA |
| | GAGTGTACCGTCTGCAGACAGGCTGTGCCCCTCCCAACACTGGCACCAGTAACTGCCG |
| | GCGGTGTTGACGCAGCGCTGGGGACAGCCGCCCCTCCTAGCACTGCATTCATCCACAT |
| | CTGACTGGCAAGTGTCACCCCGCCATCCTGCAGGGCAGCGCCAGCGGCCAGGCTGGAC |
| | ACAGCTCCCTCCGTTCCGGCATGGCGGCTGGCATATTGCTGCTCCACAGGCCCCAGGA |
| | AGCCCGCTGGTCCTCTTCCAGCCGGGGCAGCACGCGTAGCGAGGCCTGGCAGGGGCCA |
| | GCCCAGGGCTGCCGCGGTAGGCGGTCCTATAGATGGTTCGGTAGGTGCTGCAGGCCCG |
| | GTGCCCGTCGCACGTGGTGAGGAAGGGCTGGTACACACGCTGCACGAACGACTCGCAG |
| | ACAGGGTCCCCGTGAGCCCGGACAGCACACACCCTACGGCCGGGCCGGTAGGCGTCCT |
| | CTGTGCCGCCCACTGCCAACACCAGAAGCCACATCAGCAGCACCTCCTGACAGCCCCT |
| | CATGGCCTGTGCCTCCAGGCGGGGTGGCCTTCTCCTCTGGTTCTTGGGCA |

| | |
|---|---|
| ORF Start: ATG at 209 | ORF Stop: TGA at 482 |

| | | |
|---|---|---|
| SEQ ID NO: 98 | 91 aa | MW at 9729.9 kD |

| | |
|---|---|
| NOV21h, | MGPRLQQGARTFPQLRAHLALGCRWGSQGGGSQGWIHREDPSPSHARVWGASRGRGGG |
| CG52113-03 | |
| Protein Sequence | RGGRPCLAFRSVTPRWLLDPQHVGQGHGGCAA |

| | |
|---|---|
| SEQ ID NO: 99 | 1597 bp |

| | |
|---|---|
| NOV21i, | GGGCCTCAGGAGGTGCCTCCAGGCGGCCAGTGGGCCTGAGGCCCCAGCAAGGGCTAGG |
| CG52113-04 DNA | |
| Sequence | GTCCATCTCCAGTCCCAGGACACAGCAGCGGCCACCATGGCCACGCCTGGGCTCCACC |
| | AGCATCAGCAGCCCCCAGGACCGGGGAGGCACAGGTGGCCCCCACCACCCGGAGGAGC |
| | AGCTCCTGCCCCTGTCCGGGGGATCACTGATTCTCCTCCGCCACGCCACCCAGAGGAG |
| | AAGGCCACCCCGCCTGGAGGCACAGGCCATGAGGGGCTCTCAGGAGGTCCTGCTGATG |
| | TGGCTTCTGGTGTTGGCAGTGGGCGGCACAGAGCACGCCTACCGGCCCGGCCGTAGGG |
| | TGTGTGCTGTCCGGGCTCACGGGGACCCTGTCTCCGAGTCGTTCGTGCAGCGTGTGTA |
| | CCAGCCCTTCCTCACCACCTGCGACGGGCACCGCGCCTGCAGCACCTACCGAACCATC |
| | TATAGGACCGCCTACCGCCGCAGCCCTGGGCTGGCCCCTGCCAGGCCTCGCTACGCGT |
| | GCTGCCCCGGCTGGAAGAGGACCAGCGGGCTTCCTGGGGCCTGTGGAGCAGCAATATG |
| | CCAGCCGCCATGCCGGAACGGAGGGAGCTGTGTCCAGCCTGGCCGCTGCCGCTGCCCT |
| | GCAGGATGGCGGGGTGACACTTGCCAGTCAGATGTGGATGAATGCAGTCCTAGGAGGC |
| | GCGGCTGTCCCCAGCGCTGCGTCAACACCGCCGGCAGTTACTGGTCCCAGTGTTGGGA |
| | GGGGCACAGCCTGTCTGCAGACGGTACACTCTGTGTGCCCAAGGGAGGGCCCCCCAGG |
| | GTGGCCCCCAACCCGACAGGAGTGGACAGTGCAATGAAGGAAGAAGTGCAGAGGCTGC |
| | AGTCCAGGGTGGACCTGCTGGAGGAGAAGCTGCAGCTGGTGCTGGCCCCACTGCACAG |
| | CCTGGCCTCGCAGGCACTGGAGCATGGGCTCCCGGACCCCGGCAGCCTCCTGGTGCAC |
| | TCCTTCCAGCAGCTCGGCCGCATCGACTCCCTGAGCGAGCAGATTTCCTTCCTGGAGG |
| | AGCAGCTCGGGTCCTGCTCCTGCAAGAAAGACTCGTGACTGCCCAGCGCCCCAAGCTG |
| | GACTGAGCCCCTCACGCCGCCCTGCAGCCCCCATGCCCCTGCCCAACATGCTGGGGGT |
| | CCAGAAGCCACCTCGGGGTGACTGAGCGGAAGGCCAGGCAGGGCCTTCCTCCTCTTCC |
| | TCCTCCCCTTCCTCGGGAGGCTCCCCAGACCCTGGCATGGGATGGGCTGGGATCTTCT |
| | CTGTGAATCCACCCCTGGCTACCCCCACCCTGGCTACCCCAACGGCATCCCAAGGCCA |
| | GGTGGGCCCTCAGCTGAGGGAAGGTACGAGCTCCCTGCTGGAGCCTGGGACCCATGGC |
| | ACAGGCCAGGCAGCCCGGAGGCTGGGTGGGGCCTCAGTGGGGGCTGCTGCCTGACCCC |
| | CAGCACAATAAAAATGAAACGTGACAAAAAAAAAAAAAAAAAAAAAAAAAAAAAAAAA |
| | AAAAAAAAAAAAAAAAAAAAAAAAAAAAAAAAAAAAAAAAAAAAAAAAAAAAAAAAAA |
| | AAAAAAAAAAAAAAAAAAAAAAAAAAAAAAA |

| | |
|---|---|
| ORF Start: ATG at 261 | ORF Stop: TGA at 1080 |

| | | |
|---|---|---|
| SEQ ID NO: 100 | 273 aa | MW at 29617.4 kD |

| | |
|---|---|
| NOV21i, | MRGSQEVLLMWLLVLAVGGTEHAYRPGRRVCAVRAHGDPVSESFVQRVYQPFLTTCDG |
| CG52113-04 | |
| Protein Sequence | NRACSTYRTIYRTAYRRSPGLAPARPRYACCPGWKRTSGLPGACGAAICQPPCRNGGS |
| | CVQPGRCRCPAGWRGDTCQSDVDECSARRGGCPQRCVNTAGSYWCQCWEGHSLSADGT |
| | LCVPKGGPPRVAPNPTGVDSAMKEEVQRLQSRVDLLEEKLQLVLAPLHSLASQALEHG |
| | LPDPGSLLVHSFQQLGRIDSLSEQISFLEEQLGSCSCKKDS |

| | |
|---|---|
| SEQ ID NO: 101 | 883 bp |

| | |
|---|---|
| NOV21j, | TCACCCCGCCTGGACGCACAGGCCATGAGGGGCTCTCAGGAGGTGCTGCTGATGTGGC |
| CG52113-05 DNA | |
| Sequence | TTCTGGTGTTGGCAGTGGGCGGCACAGAGCACGCCTACCGGCCCGGCCGTAGGGTGTG |
| | TGCTGTCCGGGCTCACGGGGACCCTGTCTCCGAGTCGTTCGTGCAGCGTGTGTACCAG |
| | CCCTTCCTCACCACCTGCGACGGGCACCGGGCCTGCAGCACCTACCGAACCATCTATA |
| | GGACCGCCTACCGCCGCAGCCCTGGGCTGGCCCCTGCCAGGCCTCGCTACGCGTGCTG |
| | CCCCGGCTGGAAGAGGACCAGCGGGCTTCCTGGGGCCTGTGGAGCAGCAATATGCCAG |
| | CCGCCATGCCGGAACGGAGGGAGCTGTGTCCAGCCTGGCCGCTGCCGCTGCCCTGCAG |
| | GATGGCCGGGTGACACTTGCCAGTCAGATGTGGATGAATGCAGTGCTAGGAGGGGCGG |
| | CTGTCCCCAGCGCTGCATCAACACCGCCGGCAGTTACTGGTGCCAGTGTTGGGAGGGG |
| | CACAGCCTGTCTGCAGACGGTACACTCTGTGTGCCCAAGGGAGGGCCCCCCAGGGTGG |
| | CCCCCAACCCGACAGGAGTGGACAGTGCAATGAAGGAAGAAGTGCAGAGGCTGCAGTC |
| | CAGGGTGGACCTGCTGGAGGAGAAGCTGCAGCTGGTGCTGGCCCCACTGCACAGCCTG |
| | GCCTCGCAGGCACTGGAGCATGGGCTCCCGGACCCCGGCAGCCTCCTGGTGCACTCCT |
| | TCCAGCAGCTCGGCCGCATCGACTCCCTGAGCGAGCACATTTCCTTCCTGGAGGAGCA |
| | GCTGGGGTCCTGCTCCTGCAAGAAAGACTCGTGACAGCCCACCGCCCCAGGCTGGACT |
| | GAGCCCCTCACGA |

| | |
|---|---|
| ORF Start: ATG at 25 | ORF Stop: TGA at 844 |

| | | |
|---|---|---|
| SEQ ID NO: 102 | 273 aa | MW at 29631.4 kD |

| | |
|---|---|
| NOV21j, | MRGSQEVLLMWLLVLAVGGTEHAYRPGRRVCAVRAHGDPVSESFVQRVYQPFLTTCDC |
| CG52113-05 | |
| Protein Sequence | HRACSTYRTIYRTAYRRSPGLAPARPRYACCPGWKRTSCLPGACGAAICQPPCRNGGS |
| | CVQPGRCRCPAGWRGDTCQSDVDECSARRGGCPQRCINTAGSYWCQCWEGHSLSADGT |
| | LCVPKGGPPRVAPNPTGVDSAMKEEVQRLQSRVDLLEEKLQLVLAPLHSLASQALEHG |
| | LPDPGSLLVHSFQQLGRIDSLSEQISFLEEQLGSCSCKKDS |

[0477] Sequence comparison of the above protein sequences yields the following sequence relationships shown in Table 21B.

TABLE 21B
Comparison of NOV21a against NOV21b through NOV21j.

| | | Identities/ |
|---|---|---|
| | | Similarities for |
| Protein | NOV21a Residues/ | the Matched |
| Sequence | Match Residues | Region |
| NOV21b | 79 . . . 273 | 176/196 (89%) |
| | 54 . . . 249 | 179/196 (90%) |
| NOV21C | 1 . . . 273 | 273/273 (100%) |
| | 5 . . . 277 | 273/273 (100%) |
| NOV21d | 23 . . . 273 | 250/251 (99%) |
| | 3 . . . 253 | 251/251 (99%) |
| NOV21e | 1 . . . 273 | 273/273 (100%) |
| | 5 . . . 277 | 273/273 (100%) |
| NOV21f | 23 . . . 273 | 250/251 (99%) |
| | 3 . . . 253 | 251/251 (99%) |
| NOV21g | 1 . . . 273 | 273/273 (100%) |
| | 21 . . . 293 | 273/273 (100%) |
| NOV21h | No Significant Alignment Found. | |
| NOV21i | 1 . . . 273 | 273/273 (100%) |
| | 1 . . . 273 | 273/273 (100%) |
| NOV21j | 1 . . . 273 | 272/273 (99%) |
| | 1 . . . 273 | 273/273 (99%) |

[0478] Further analysis of the NOV21a protein yielded the following properties shown in Table 21C.

TABLE 21C
Protein Sequence Properties NOV21a

| | |
|---|---|
| PSort | 0.5500 probability located in endoplasmic reticulum |
| analysis: | (membrane); 0.1900 probability located in lysosome (lumen); |
| | 0.1000 probability located in endoplasmic reticulum (lumen); |
| | 0.1000 probability located in outside |
| SignalP | Cleavage site between residues 23 and 24 |
| analysis: | |

[0479] A search of the NOV21a protein against the Geneseq database, a proprietary database that contains sequences published in patents and patent publication, yielded several homologous proteins shown in Table 21D.

TABLE 21D
Geneseq Results for NOV21a

| | | NOV21a | Identities/ | |
|---|---|---|---|---|
| | | Residues/ | Similarities | |
| Geneseq | Protein/Organism/Length | Match | for the Matched | Expect |
| Identifier | [Patent #, Date] | Residues | Region | Value |
| AAB61609 | Human protein HP03375 - Homo | 1 . . . 273 | 273/273 (100%) | e−168 |
| | sapiens, 273 aa. | 1 . . . 273 | 273/273 (100%) | |
| | [WO200102563-A2, 11 JAN. | | | |
| | 2001] | | | |
| AAM23991 | Human EST encoded protein | 1 . . . 273 | 273/273 (100%) | e−168 |
| | SEQ ID NO: 1516 - Homo | 1 . . . 273 | 273/273 (100%) | |
| | sapiens, 273 aa. | | | |
| | [WO200154477-A2, 02 AUG. | | | |
| | 2001] | | | |
| AAB01376 | Neuron-associated protein - | 1 . . . 273 | 273/273 (100%) | e−168 |
| | Homo sapiens, 273 aa. | 1 . . . 273 | 273/273 (100%) | |
| | [WO200034477-A2, 15 JUN. | | | |
| | 2000] | | | |
| AAB24044 | Human PRO1449 protein | 1 . . . 273 | 273/273 (100%) | e−168 |
| | sequence SEQ ID NO: 8 - Homo | 1 . . . 273 | 273/273 (100%) | |
| | sapiens, 273 aa. | | | |
| | [WO200053754-A1, 14 SEP. | | | |
| | 2000] | | | |
| AAB18675 | Amino acid sequence of a | 1 . . . 273 | 273/273 (100%) | e−168 |
| | human a PRO1449 polypeptide - | 1 . . . 273 | 273/273 (100%) | |
| | Homo sapiens, 273 aa. | | | |
| | [WO200053752-A2, 14 SEP. | | | |
| | 2000] | | | |

[0480] In a BLAST search of public sequence datbases, the NOV21a protein was found to have homology to the proteins shown in the BLASTP data in Table 21E.

TABLE 21E
Public BLASTP Results for NOV21a

| | | NOV21a | Identities/ | |
|---|---|---|---|---|
| Protein | | Residues/ | Similarities | |
| Accession | | Match | for the Matched | Expect |
| Number | Protein/Organism/Length | Residues | Portion | Value |
| Q9UHF1 | NOTCH4-like protein | 1 . . . 273 | 273/273 (100%) | e−168 |
| | (Hypothetical 29.6 kDa | 1 . . . 273 | 273/273 (100%) | |
| | protein) - Homo sapiens | | | |
| | (Human), 273 aa. | | | |
| Q96EG0 | Similar to NEU1 protein - | 1 . . . 273 | 272/273 (99%) | e−167 |
| | Homo sapiens (Human), 273 aa. | 1 . . . 273 | 273/273 (99%) | |
| CAC38966 | Sequence 17 from Patent | 1 . . . 273 | 234/273 (85%) | e−136 |
| | WO0119856 - Homo sapiens | 1 . . . 234 | 234/273 (85%) | |
| | (Human), 234 aa. | | | |
| Q9QXT5 | NOTCH4-like protein | 1 . . . 272 | 214/274 (78%) | e−129 |
| | (Vascular endothelial zinc | 4 . . . 277 | 232/274 (84%) | |
| | finger 1) - Mus musculus | | | |
| | (Mouse), 278 aa. | | | |
| Q9DCP5 | Vascular endothelial zinc | 1 . . . 272 | 203/274 (74%) | e−119 |
| | finger 1 - Mus musculus | 4 . . . 264 | 220/274 (80%) | |
| | (Mouse), 265 aa. | | | |

[0481] PFam analysis predicts that the NOV21a protein contains the domains shown in the Table 21F.

TABLE 21F
Domain Analysis of NOV21a

| | | Identities/ | |
|---|---|---|---|
| Pfam | NOV21a | Similarities for | Expect |
| Domain | Match Region | the Matched Region | Value |
| EGF | 107 . . . 134 | 15/47 (32%) | 0.0037 |
| | | 22/47 (47%) | |
| EGF | 141 . . . 176 | 15/47 (32%) | 0.0012 |
| | | 25/47 (53%) | |

### Example 22

[0482] The NOV22 clone was analyzed, and the nucleotide and encoded polypeptide sequences are shown in Table 22A.

TABLE 22A
NOV22, Sequence Analysis

| | |
|---|---|
| SEQ ID NO: 103 | 1303 bp |

| | |
|---|---|
| NOV22a, | ATATCCAATGGGCTGATTTATCTGACGGTCATGGCCATGGATGCTGGCAACCCCCCTC |
| CG57542-01 DNA | |
| Sequence | TCAACAGCACCGTCCCTGTCACCATCGAGGTGTTTGATGAGAATGACAACCCTCCCAC |
| | CTTCAGCAAGCCCGCCTACTTCGTCTCCGTGGTCGAGAACATCATGGCAGGACCCACG |
| | GTGCTGTTCCTGAATGCCACAGACCTGGACCGCTCCCGGGAGTACGGCCAGGAGTCCA |
| | TCATCTACTCCTTGGAAGGCTCCACCCAGTTTCGGATCAATGCCCGCTCAGGGGAAAT |
| | CACCACCACGTCTCTGCTTGACCCAGAGACCAAGTCTGAATACATCCTCATCGTTCGC |
| | GCAGTGGACGGGGGTGTGGGCCACAACCAGAAAACTGGCATCGCCACCGTAAACATCA |
| | CCCTCCTGGACATCAACGACAACCACCCCACGTGGAAGGACGCACCCTACTACATCAA |
| | CCTGGTGGAGATGACCCCTCCAGACTCTGACGTGACCACGGTGGTGGCTGTTGACCCA |
| | GACCTGGGGGAGAATGGCACCCTGGTGTACAGCATCCAGCCACCCAACAAGTTCTACA |
| | GCCTCAACAGCACCACGGCCAAGATCCGCACCACCCACGCCATGCTGGACCGGGAGAA |
| | CCCCGACCCCCATGAGGCCGAGCTGATGCGCAAAATCGTCGTCTCTGTTACTGACTGT |
| | GGCAGGCCCCCTCTGAAAGCCACCAGCAGTGCCACAGTGTTTGTGAACCTCTTGGATC |
| | TCAATGACAATGACCCCACCTTTCAGAACCTGCCTTTTGTGGCCGAGGTGCTTGAAGG |
| | CATCCCGGCGGGGGTCTCCATCTACCAAGTGGTGGCCATCGACCTCGATGAGGGCCTG |
| | AACGGCCTGGTGTCCTACCGCATCCCGGTGGGCATGCCCCGCATGGACTTCCTCATCA |
| | ACACCAGCAGCGGCGTGGTGGTCACCACCACCGAGCTGGACCGCGAGCGCATCGCGGA |
| | GTACCAGCTGCGGGTGGTGGCCAGTCATGCAGGCACGCCCACCAAGAGCTCCACCAGC |
| | ACGCTCACCATCCATGTGCTGGATGTGAACGACGAGACGCCCACCTTCTTCCCGGCCG |
| | TGTACAATGTGTCTGTGTCCGAGGACGTGCCACGCGAGTTCCGGGTGGTCTGGCTGAA |
| | CTGCACGGACAACGACGTGGGCCTCAATGCAGAGCTCAGCTACTTCATCACAGGTGCT |
| | GCCCCGGCCTCCGCCCACCTGTGCAGGCCTCCTGGGCCCCTGCCTCCACCCCTCCCAG |
| | ATGGACAGCCAGACTAGGTGGGGGCAG |

| | |
|---|---|
| ORF Start: ATG at 31 | ORF Stop: TAG at 1291 |

| | | |
|---|---|---|
| SEQ ID NO: 104 | 420 aa | MW at 45678.7 kD |

| | |
|---|---|
| NOV22a, | MAMDAGNPPLNSTVPVTIEVFDENDNPPTFSKPAYFVSVVENIMAGATVLFLNATDLD |
| CG57542-01 | |
| Protein Sequence | RSREYGQESIIYSLEGSTQFRINARSGEITTTSLLDRETKSEYILIVRAVDGGVGHNQ |
| | KTGIATVNITLLDINDNHPTWKDAPYYINLVEMTPPDSDVTTVVAVDPDLGENGTLVY |
| | SIQPPNKFYSLNSTTGKIRTTHAMLDRENPDPHEAELMRKIVVSVTDCGRPPLKATSS |
| | ATVFVNLLDLNDNDPTFQNLPFVAEVLEGIPAGVSIYQVVAIDLDEGLNGLVSYRMPV |
| | GMPRMDFLINSSSGVVVTTTELDRERIAEYQLRVVASDAGTPTKSSTSTLTIHVLDVN |
| | DETPTFFPAVYNVSVSEDVPREFRVVWLNCTDNDVGLNAELSYFITGAAPASAHLCRP |
| | PGALPPPLPDGQPD |

| | |
|---|---|
| SEQ ID NO: 105 | 1113 bp |

| | |
|---|---|
| NOV22b, | GGATCCGCCACAGACCTGGACCGCTCCCGGGAGTACGGCCAGGAGTCCATCATCTACT |
| 169258612 DNA | |
| Sequence | CCTTGGAAGGCTCCACCCAGTTTCGGATCAATGCCCGCTCAGGGGAAATCACCACCAC |
| | GTCTCTGCTTGACCGAGAGACCAAGTCTGAATACATCCTCATCGTTCGCGCAGTGGAC |
| | GGGGGTGTGGGCCACAACCAGAAAACTGGCATCGCCACCGTAAACATCACCCTCCTGG |
| | ACATCAATGACAACCACCCCACGTGGAACGACGCACCCTACTACATCAACCTGGTGGA |
| | GATGACCCCTCCAGACTCTGATGTGACCACGGTGGTGGCTGTTGACCCAGACCTGGGA |
| | GAGAATGGCACCCTGGTGTACAGCATCCAGCCACCCAACAAGTTCTACACCCTCAACA |
| | GCACCACGGGCAAGATCCGCACCACCCACGCCATGCTGGACCGGGAGAACCCCGACCC |
| | CCATGAGGCCGAGCTGATGCGCAAAATCGTCGTCTCTGTTACTGACTGTGGCAGGCCC |
| | CCTCTGAAAGCCACCAGCAGTGCCACAGTGTTTGTGAACCTCTTGGATCTCAATGACA |
| | ATGACCCCACCTTTCAGAACCTGCCTTTTGTGGCCGAGGTGCTTGAAGGCATCCCGGC |
| | GGGGGTCTCCATCTACCAAGTGGTGGCCATCGACCTCGATGAGGGCCTGAACGGCCTG |
| | GTGTCCTACCGCATGCCGGTGGGCATGCCCCGCATGGACTTCCTCATCAGCAGCAGCA |
| | GCGGCGTGGTGGTCACCACCACCGAGCTGGACCGCGAGCGCATCGCGGAGTACCAGCT |
| | GCGGGTGGTGGCCAGTGATGCAGGCACGCCCACCAAGAGCTCCACCAGCACGCTCACC |
| | ATCCATGTGCTGGATGTGAACGACGAGACGCCCACCTTCTTCCCGGCCGTGTACAATG |
| | TGTCCGTGTCCGAGGACGTGCCACGCGAGTTCCGGGTGGTCTGGCTGAACTGCACGGA |
| | CAACGACGTGGGCCTCAATGCAGAGCTCAGCTATTTCATCACAGGTGCTGCCCCGGCC |
| | TCCGCCCACCTGTGCAGGCCTCCTGGGGCCCTGCCTCCACCCCTCCCAGATGGACAGC |
| | CAGACCTCGAG |

| | |
|---|---|
| ORF Start: at 1 | ORF Stop: end of sequence |

| | | |
|---|---|---|
| SEQ ID NO: 106 | 371 aa | MW at 40369.7 kD |

| | |
|---|---|
| NOV22b, | GSATDLDRSREYGQESIIYSLEGSTQFRINARSGEITTTSLLDRETKSEYILIVRAVD |
| 169258612 | |
| Protein Sequence | GGVGHNQKTGIATVNITLLDINDNHPTWKDAPYYINLVEMTPPDSDVTTVVAVDPDLG |
| | ENGTLVYSIQPPNKFYSLNSTTGKIRTTHAMLDRENPDPHEAELMRKIVVSVTDCGRP |
| | PLKATSSATVFVNLLDLNDNDPTFQNLPFVAEVLEGIPAGVSIYQVVAIDLDEGLNGL |
| | VSYRMPVGMPRMDFLISSSSGVVVTTTELDRERIAEYQLRVVASDAGTPTKSSTSTLT |
| | IHVLDVNDETPTFFPAVYNVSVSEDVPREFRVVWLNCTDNDVGLNAELSYFITGAAPA |
| | SAHLCRPPGALPPPLPDGQPDLE |

| | |
|---|---|
| SEQ ID NO: 107 | 1114 bp |

| | |
|---|---|
| NOV22c, | GGATCCGCCACAGACCTGGACCGCTCCCCGGAGTACGGCCAGGAGTCCATCATCTACT |
| 169258615 DNA | |
| Sequence | CCTTGGAAGGCTCCACCCAGTTTCGGATCAATGCCCGCTCCAGGGGAAATCACCACCA |
| | CGTCTCTGCTTGACCGAGAGACCAAGTCTGAATACATCCTCATCGTTCGCGCAGTGGA |
| | CGGGGGTGTGGGCCACAACCAGAAAACTGGCATCGCCACCGTAAACATCACCCTCCTG |
| | GACATCAATGACAACCACCCCACGTGGAAGGACGCACCCTACTACATCAACCTGGTGG |
| | AGATGACCCCTCCAGACTCTGATGTGACCACGGTGGTGGCTGTTGACCCAGACCTGGG |
| | GGAGAATGGCACCCTGGTGTACAGCATCCAGCCACCCAACAAGTTCTACAGCCTCAAC |
| | AGCACCACGGGCAAGATCCGCACCACCCACGCCATGCTGGACCGGGAGAACCCCGACC |
| | CCCATGAGGCCGAGCTGATGCGCAAAATCGTCGTCTCTGTTACTGACTGTGGCAGGCC |
| | CCCTCTGAAAGCCACCAGCAGTGCCACAGTGTTTGTGAACCTCTTGGATCTCAATGAC |
| | AATGACCCCACCTTTCAGAACCTGCCTTTTGTGGCCGAGGTGCTTGAAGGCATCCCGG |
| | CGGGGGTCTCCATCTACCAAGTGGTGGCCATCGACCTCGATGAGGGCCTGAACGGCCT |
| | GGTGTCCTACCGCATGCTGGTGGGCATGCCCCACATGGACTTCCTCATCAACAGCAGC |
| | AGCGGCGTGGTGGTCACCACCACCGAGCTGGACCGCGAGCGCATCGCGAAGTACCAGC |
| | TGCGGGTGGTGGCCAGTGATGCAGGCACGCCCACCAAGAGCTCCACCAGCACGCTCAC |
| | CATCCATGTGCTGGATGTGAACGACGAGACGCCCACCTTCTTCCCGGCCGTGTACAAT |
| | GTGTCTGTGTCCGAGGACGTGCCACGCGAGTTCCGGGTGGTCTGGCTGAACTGCACGG |
| | ACAACGACGTGGGCCTCAATGCAGAGCTCAGCTACTTCATCACAGGTGCTGCCCCGGC |
| | CTCCGCCCACCTGTGCAGGCCTCCTGGGGCCCTGCCTCCACCCCTCCCAGATGGACAG |
| | CCAGACCTCGAG |

| | |
|---|---|
| ORF Start: at 2 | ORF Stop: end of sequence |

| | | |
|---|---|---|
| SEQ ID NO: 108 | 371 aa | MW at 40080.6 kD |

| | |
|---|---|
| NOV22c, | DPPQTWTAPGSTARSPSSTPWKAPPSFGSMPAPGEITTTSLLDRETKSEYILIVRAVD |
| 169258615 | |
| Protein Sequence | GGVGHNQKTGIATVNITLLDINDNHPTWKDAPYYINLVEMTPPDSDVTTVVAVDPDLG |
| | ENGTLVYSIQPPNKFYSLNSTTGKIRTTHAMLDRENPDPHEAELMRKIVVSVTDCGRP |
| | PLKATSSATVFVNLLDLNDNDPTFQNLPFVAEVLEGTPAGVSIYQVVAIDLDEGLNGL |
| | VSYRMLVGMPHMDFLINSSSGVVVTTTELDRERIAKYQLRVVASDAGTPTKSSTSTLT |
| | IHVLDVNDETPTFFPAVYNVSVSEDVPREFRVVWLNCTDNDVGLNAELSYFITGAAPA |
| | SAHLCRPPGALPPPLPDGQPDLE |

| | |
|---|---|
| SEQ ID NO: 109 | 1114 bp |

| | |
|---|---|
| NOV22d, | GGATCCGCCACAGACCTGGACCGCTCCCCGGGAGTACGGCCAGGAGTCCATCATCTAC |
| 169258621 DNA | |
| Sequence | TCCTTGGAAGGCTCCACCCAGTTTCGGATCAATGCCCGCTCAGGGGAAATCACCACCA |
| | CGTCTCTGCTTGACCGAGAGACCAAGTCTGAATACATCCTCATCGTTCGCGCAGTGGA |
| | CGGGGGTGTGGGCCACAACCAGAAAACTGGCATCGCCACCGTAAACATCACCCTCCTG |
| | GACATCAATGACAACCACCCCACGTGGAAGGACGCACCCTACTACATCAACCTGGTGG |
| | AGATGACCCCTCCAGACTCTGATGTGACCACGGTGGTGGCTGTTGACCCAGACCTGGG |
| | GGAGAATGGCACCCTGGTGTACAGCATCCAGCCACCCAACAAGTTCTACAGCCTCAAC |
| | AGCACCACGGGCAAGATCCGCACCACCCACGCCATGCTGGACCGGGAGAACCCCGACC |
| | CCCATGAGGCCGAGCTGATGCGCAAAATCGTCGTCTCTGTTACTGACTGTGGCAGGCC |
| | CCCTCTGAAAGCCACCAGCAGTGCCACAGTGTTTGTGAACCTCTTGGATCTCAATGAC |
| | AATGACCCCACCTTTCAGAACCTGCCTTTTGTGCCCGAGGTGCTTGAAGGCATCCCGG |
| | CGGGGGTCTCCATCTACCAAGTGGTGGCCATCGACCTCGATGAGGGCCTGAACGGCCT |
| | GGTGTCCTACCGCATGCCGGTGGGCATGCCCCGCATGGACTTCCTCATCAACAGCAGC |
| | AGCGGCGTGGTGGTCACCACCACCGAGCTGGACCGCGAGCGCATCGCCGAGTACCAGC |
| | TGCGGGTGGTGGCCAGTGATGCAGGCACGCCCACCAAGAGCTCCACCAGCACGCTCAC |
| | CATCCATGTGCTGGATGTGAACGACGAGACGCCCACCTTCTTCCCGGCCGTGTACAAT |
| | GTGTCTGTGTCCGAGGACGTGCCACCCGAGTTCCGGGTGGTCTGGCTGAACTGCACGG |
| | ACAACGACGTGGGCCTCAATGCAGAGCTCAGCTACTTCATCACAGGTGCTGCCCCGGC |
| | CTCCGCCCACCTGTGCAGGCCTCCTGGGGCCCTGCCTCCACCCCTCCCAGATGGACAG |
| | CCAGACCTCGAG |

| | |
|---|---|
| ORF Start: at 2 | ORF Stop: end of sequence |

| | | |
|---|---|---|
| SEQ ID NO: 110 | 371 aa | MW at 40487.9 kD |

| | |
|---|---|
| NOV22d, | DPPQTWTAPREYGQESIIYSLEGSTQFRINARSGEITTTSLLDRETKSEYILIVRAVD |
| 169258621 | |
| Protein Sequence | GGVGHNQKTGIATVNITLLDINDNHPTWKDAPYYINLVEMTPPDSDVTTVVAVDPDLG |
| | ENGTLVYSIQPPNKFYSLNSTTGKIRTTHAMLDRENPDPHEAELMRKIVVSVTDCGRP |
| | PLKATSSATVFVNLLDLNDNDPTFQNLPFVAEVLEGIPAGVSIYQVVAIDLDEGLNGL |
| | VSYRMPVGMPRMDFLINSSSGVVVTTTELDRERIAEYQLRVVASDAGTPTKSSTSTLT |
| | IHVLDVNDETPTFFPAVYNVSVSEDVPREFRVVWLNCTDNDVGLNAELSYFITGAAPA |
| | SAHLCRPPGALPPPLPDGQPDLE |

| | |
|---|---|
| SEQ ID NO: 111 | 1114 bp |

| | |
|---|---|
| NOV22e, | GGATCCGCCACAGACCTGGACCGCTCCCGGGAGTACGGCCACGAGTCCATCATCTACT |
| 174307774 DNA | |
| Sequence | CCTTGGAAGGCTCCACCCAGTTTCGGATCAATGCCCGCTCAGGGGAAATCACCACCAC |
| | GTCTCTGCTTGACCGAGAGACCAAGTCTGAATACATCCTCATCGTTCGCGCAGTGGAC |
| | GGGGGTGTGGGCCACAACCAGAAAACTGGCATCGCCACCGTAAACATCACCCTCCTGG |
| | ACATCAACGACAACCACCCCACGTGGAAGGACGCACCCTACTACATCAACCTGGTGGA |
| | GATGACCCCTCCAGACTCTGACGTGACCACGGTGGTGGCTGTTGACCCAGACCTGGGG |
| | GAGAATGGCACCCTGGTGTACAGCATCCAGCCACCCAACAAGTTCTACAGCCTCAACA |
| | GCACCACGGGCAAGATCCGCACCACCCACGCCATGCTGGACCGGGAGAACCCCGACCC |
| | CCATGAGGCCGAGCTGATGCGCAAAATCGTCGTCTCTGTTACTGACTGTGGCAGGCCC |
| | CCTCTGAAAGCCACCAGCAGTGCCACAGTGTTTGTGAACCTCTTGGATCTCAATGACA |
| | ATGACCCCACCTTTCAGAACCTGCCTTTTGTGGCCGAGGTGCTTGAAGGCATCCCGGC |
| | GGGGGTCTCCATCTACCAAGTGGTGGCCATCGACCTCGATGAGGGCCTGAACGGCCTG |
| | GTGTCCTACCGCATGCCGGTGGGCATGCCCCGCATGGACTTCCTCATCAACAGCAGCA |
| | GCGGCGTGGTGGTCACCACCACCGAGCTGGACCGCGAGCGCATCGCGGAGTACCAGCT |
| | GCGGGTGGTGGCCAGTGATGCAGGCACGCCCACCAAGAGCTCCACCAGCACGCTCACC |
| | ATCCATGTGCTGGATGTCAACGACGAGACGCCCACCTTCTTCCCGGCCGTGTACAATG |
| | TGTCTGTGTCCGAGCACGTGCCACGCGAGTTCCCGGTGGTCTGCCTGAACTGCACGCA |
| | CAACGACGTGGGCCTCAATGCAGAGCTCAGCTACTTCATCACAGGGTGCTGCCCCGGC |
| | CTCCGCCCACCTGTGCAGGCCTCCTGGGGCCTTGCCTCCACCCCTCCCAGATGGACAG |
| | CCAGACCTCGAG |

| | |
|---|---|
| ORF Start: at 1 | ORF Stop: end of sequence |

| | | |
|---|---|---|
| SEQ ID NO: 112 | 372 aa | MW at 40670.2 kD |

| | |
|---|---|
| NOV22e, | GSATDLDRSREYGQESIIYSLEGSTQFRINARSGEITTTSLLDRETKSEYILIVRAVD |
| 174307774 | |
| Protein Sequence | GGVGHNQKTGIATVNITLLDINDNHPTWKDAPYYINLVEMTPPDSDVTTVVAVDPDLG |
| | ENGTLVYSIQPPNKFYSLNSTTGKIRTTHAMLDRENPDPHEAELMRKIVVSVTDCGRP |
| | PLKATSSATVFVNLLDLNDNDPTFQNLPFVAEVLEGIPAGVSIYQVVAIDLDEGLNGL |
| | VSYRMPVGMPRMDFLINSSSGVVVTTTELDRERIAEYQLRVVASDAGTPTKSSTSTLT |
| | IHVLDVNDETPTFFPAVYNVSVSEDVPREFRVVWLNCTDNDVGLNAELSYFITGCCPG |
| | LRPPVQASWGLASTPPRWTARPRX |

[0483] Sequence comparison of the above protein sequences yields the following sequence relationships shown in Table 22B.

TABLE 22B
Comparison of NOV22a against NOV22b through NOV22e.

| | | Identities/ |
|---|---|---|
| | | Similarities for |
| Protein | NOV22a Residues/ | the Matched |
| Sequence | Match Residues | Region |
| NOV22b | 53 . . . 420 | 366/368 (99%) |
| | 2 . . . 369 | 368/368 (99%) |
| NOV22c | 85 . . . 420 | 333/336 (99%) |
| | 34 . . . 369 | 334/336 (99%) |
| NOV22d | 61 . . . 420 | 360/360 (100%) |
| | 10 . . . 369 | 360/360 (100%) |
| NOV22e | 53 . . . 407 | 346/355 (97%) |
| | 2 . . . 352 | 347/355 (97%) |

[0484] Further analysis of the NOV22a protein yielded the following properties shown in Table 22C.

TABLE 22C
Protein Sequence Properties NOV22a

| | |
|---|---|
| PSort | 0.7900 probability located in plasma membrane; 0.3000 |
| analysis: | probability located in microbody (peroxisome); 0.3000 |
| | probability located in Golgi body; 0.2000 probability located |
| | in endoplasmic reticulum (membrane) |
| SignalP | No Known Signal Sequence Predicted |
| analysis: | |

[0485] A search of the NOV22a protein against the Geneseq database, a proprietary database that contains sequences published in patents and patent publication, yielded several homologous proteins shown in Table 22D.

TABLE 22D
Geneseq Results for NOV22a

| | | NOV22a | Identities/ | |
|---|---|---|---|---|
| | | Residues/ | Similarities | |
| Geneseq | Protein/Organism/Length | Match | for the Matched | Expect |
| Identifier | [Patent #, Date] | Residues | Region | Value |
| AAM39046 | Human polypeptide SEQ ID NO | 1 . . . 420 | 418/420 (99%) | 0.0 |
| | 2191 - Homo sapiens, 546 aa. | 127 . . . 546 | 419/420 (99%) | |
| | [WO200153312-A1, 26 JUL. | | | |
| | 2001] | | | |
| AAM38969 | Human polypeptide SEQ ID NO | 1 . . . 420 | 418/420 (99%) | 0.0 |
| | 2114 - Homo sapiens, 558 aa. | 139 . . . 558 | 419/420 (99%) | |
| | [WO200153312-A1, 26 JUL. | | | |
| | 2001] | | | |
| AAU01093 | Gene 24 Human secreted | 1 . . . 382 | 382/382 (100%) | 0.0 |
| | protein homologous amino | 68 . . . 449 | 382/382 (100%) | |
| | acid sequence - Homo | | | |
| | sapiens, 449 aa. | | | |
| | [WO200123402-A1, 05 APR. | | | |
| | 2001] | | | |
| ABG03875 | Novel human diagnostic | 85 . . . 395 | 306/402 (76%) | e−161 |
| | protein #3866 - Homo | 994 . . . 1390 | 306/402 (76%) | |
| | sapiens, 1509 aa. | | | |
| | [WO200175067-A2, 11 OCT. | | | |
| | 2001] | | | |
| AAM40755 | Human polypeptide SEQ ID NO | 123 . . . 395 | 262/273 (95%) | e−148 |
| | 5686 - Homo sapiens, 350 aa. | 6 . . . 278 | 263/273 (95%) | |
| | [WO200153312-A1, 26 JUL. | | | |
| | 2001] | | | |

[0486] In a BLAST search of public sequence datbases, the NOV22a protein was found to have homology to the proteins shown in the BLASTP data in Table 22E.

TABLE 22E
Public BLASTP Results for NOV22a

| | | NOV22a | Identities/ | |
|---|---|---|---|---|
| Protein | | Residues/ | Similarities | |
| Accession | | Match | for the Matched | Expect |
| Number | Protein/Organism/Length | Residues | Portion | Value |
| AAH32581 | Similar to cadherin related | 1 . . . 420 | 420/420 (100%) | 0.0 |
| | 23 - Homo sapiens (Human), | 642 . . . 1061 | 420/420 (100%) | |
| | 1061 aa. | | | |
| Q96JL3 | KIAA1812 protein - Homo | 1 . . . 395 | 395/395 (100%) | 0.0 |
| | sapiens (Human), 803 aa | 233 . . . 627 | 395/395 (100%) | |
| | (fragment). | | | |
| Q9H251 | Cadherin-23 precursor | 1 . . . 395 | 395/395 (100%) | 0.0 |
| | (Otocadherin) - Homo | 642 . . . 1036 | 395/395 (100%) | |
| | sapiens (Human), 3354 aa. | | | |
| P58365 | Cadherin 23 precursor | 1 . . . 394 | 377/394 (95%) | 0.0 |
| | (Otocadherin) - Rattus | 640 . . . 1033 | 385/394 (97%) | |
| | norvegicus (Rat), 3317 aa. | | | |
| Q99PF4 | Cadherin 23 precursor | 1 . . . 394 | 374/394 (94%) | 0.0 |
| | (Otocadherin) - Mus | 642 . . . 1035 | 384/394 (96%) | |
| | musculus (Mouse), 3354 aa. | | | |

[0487] PFam analysis predicts that the NOV22a protein contains the domains shown in the Table 22F.

TABLE 22F
Domain Analysis of NOV22a

| | | Identities/ | |
|---|---|---|---|
| | | Similarities for | |
| Pfam | NOV22a | the Matched | Expect |
| Domain | Match Region | Region | Value |
| cadherin | 35 . . . 128 | 41/108 (38%) | 6.2e−17 |
| | | 67/108 (62%) | |
| cadherin | 142 . . . 238 | 36/112 (32%) | 3.1e−11 |
| | | 67/112 (60%) | |
| cadherin | 254 . . . 345 | 41/107 (38%) | 1.9e−24 |
| | | 69/107 (64%) | |

### Example 23

[0488] The NOV23 clone was analyzed, and the nucleotide and encoded polypeptide sequences are shown in Table 23A.

TABLE 23A
NOV23 Sequence Analysis

| | |
|---|---|
| SEQ ID NO: 113 | 1772 bp |

| | |
|---|---|
| NOV2 3a, | CTTTTGCACTGATCATTTCTCTTAATTGGCAGGTAACAAGGAGGGAGCGCATTCTTCC |
| CG57774-01 DNA | |
| Sequence | ACCTTCTGGGTGCTGCTGAGTATCTTTCTGGGAGCAGTGGCCATGCTGTGCAAAGAGC |
| | AAGGGATCACTGTGCTGGGTTTAAATGCGGTATTTGACATCTTGGTGATAGGCAAATT |
| | CAATGTTCTGGAAATTGTCCAGAAGGTACTACATAAGGACAAGTCATTAGAGAATCTC |
| | GGCATGCTCAGGAACGGGGGCCTCCTCTTCAGAATGACCCTGCTCACCTCTGGAGGGG |
| | CTGGGATGCTCTACGTGCGCTGGAGGATCATGGGCACGGGCCCGCCGGCCTTCACCGA |
| | GGTGGACAACCCGGCCTCCTTTGCTGACAGCATGCTGGTGAGGGCCGTAAACTACAAT |
| | TACTACTATTCATTGAATGCCTCGCTGCTGCTGTGTCCCTGGTGGCTGTGTTTTCATT |
| | GGTCAATGGGCTGCATCCCCCTCATTAAGTCCATCAGCGACTGGAGGGTAATTGCACT |
| | TGCAGCACTCTGGTTCTGCCTAATTGGCCTGATATGCCAAGCCCTGTGCTCTGAAGAC |
| | GGCCACAAGAGAAGGATCCTTACTCTGGGCCTGGGATTTCTCGTTATCCCATTTCTCC |
| | CCGCGAGTAACCTGTTCTTCCGAGTGGCCTTCGTGGTCGCACAGCGTGTCCTCTACCT |
| | CCCCAGCGTTGGGTACTGTGTGCTGCTGACTTTTGGATTCGGAGCCCTGAGCAAACAT |
| | ACCAAGAAAAAGAAACTCATTGCCCCTGTCGTGCTGGGAATCTTATTCATCAACACGC |
| | TGAGATGTCTGCTGCGCAGCGGCGAGTGGCGGAGTGAGGAACAGCTTTTCAGAAGTGC |
| | TCTGTCTGTGTGTCCCCTCAATGCTAAGGTACACTACAACATTGGCAAAAACCTCGCT |
| | GATAAACGCAACCAGACAGCTGCCATCAGATACTACCGGGAAGCTGTAAGATTAAATC |
| | CCAAGTATGTTCATGCCATGAATAATCTTGGAAATATCTTAAAAGAAAGGAATGAGCT |
| | ACAGGAAGCTGAGGAGCTGCTGTCTTTGGCTGTTCAAATACAGCCAGACTTTGCCGCT |
| | GCGTGGATGAATCTAGCCATAGTGCAGAATAGCCTGAAACGGTTTGAAGCAGCAGAGC |
| | AAAGTTACCGGACAGCAATTAAACACAGAAGGAAATACCCAGACTGTTACTACAACCT |
| | CGGGCGTCTGTATGCAGATCTCAATCGCCACGTGGATGCCTTGAATCCGTGGAGAAAT |
| | GCCACCGTGCTGAAACCAGAGCACAGCCTGGCCTGGAACAACATGATTATACTCCTCG |
| | ACAATACAGGTAATTTAGCCCAAGCTGAAGCAGTTGGAAGAGACGCACTGGAATTAAT |
| | ACCTAATGATCACTCTCTCATGTTCTCGTTGGCAAACGTGCTGGGGAAATCCCAGAAA |
| | TACAAGGAATCTGAAGCTTTATTCCTCAAGGCAATTAAAGCAAATCCAAATGCTGCAA |
| | GTTACCATGGTAATTTGGCTGTGCTTTATCATCGTTGGGGACATCTAGACTTGGCCAA |
| | GAAACACTATGAAATCTCCTTGCAGCTTGACCCCACGGCATCAGGAACTAAGGAGAAT |
| | TACGGTCTGCTGAGAAGAAAGCTAGAACTAATGCAAAAGAAAGCTGTCTGATCCTGTT |
| | TCCTTCATGTTTTGAGTTTGAGTGTGTGTGTGCATGAGGCATATCATTAATAGTATGT |
| | GGTTACATTTAACCATTTAAAAGTCTTAGACA |

| | |
|---|---|
| ORF Start: ATG at 101 | ORF Stop: TGA at 1673 |

| | | |
|---|---|---|
| SEQ ID NO: 114 | 524 aa | MW at 59138.5 kD |

| | |
|---|---|
| NOV23a, | MLCKEQGITVLGLNAVFDILVIGKFNVLEIVQKVLHKDKSLENLGMLRNGCLLFRMTL |
| CG57774-01 | |
| Protein Sequence | LTSGGAGMLYVRWRIMGTGPPAFTEVDNPASFADSMLVRAVNYNYYYSLNAWLLLCPW |
| | WLCFDWSMGCIPLIKSISDWRVIALAALWFCLIGLICQALCSEDGHKRRILTLGLGFL |
| | VIPFLPASNLFFRVGFVVAERVLYLPSVGYCVLLTFGFGALSKHTKKKKLIAAVVLGI |
| | LFINTLRCVLRSGEWRSEEQLFRSALSVCPLNAKVHYNIGKNLADKGNQTAAIRYYRE |
| | AVRLNPKYVHAMNNLGNILKERNELQEAEELLSLAVQIQPDFAAAWMNLGIVQNSLKR |
| | FEAAEQSYRTAIKHRRKYPDCYYNLGRLYADLNRHVDALNAWRNATVLKPEHSLAWNN |
| | MIILLDNTGNLAQAEAVGREALELIPNDHSLMFSLANVLGKSQKYKESEALFLKAIKA |
| | NPNAASYHGNLAVLYHRWGHLDLAKKHYEISLQLDPTASGTKENYGLLRRKLELMQKK |
| | AV |

| | |
|---|---|
| SEQ ID NO: 115 | 1515 bp |

| | |
|---|---|
| NOV23b, | GAATTCAAATTCAATGTTCTGCAAATTGTCCAGAAGGTACTACATAAGGACAAGTCAT |
| 167200132 DNA | |
| Sequence | TAGAGAATCTCGGCATGCTCAGGAACGGGGGCCTCCTCTTCAGAATGACCCTGCTCAC |
| | CTCTGGAGGGCCTGGGATGCTCTACGTGCGCTGGAGGATCATGGGCACGGGCCCGCCG |
| | GCCTTCACCGAGGTGGACAACCCGGCCTCCTTTGCTGACAGCATGCTGGTGAGGGCCG |
| | TAAACTACAATTACTACTATTCATTGAATGCCTGGCTGCTGCTGTGTCCCTGGTGGCT |
| | GTGTTTTGATTGGTCAATGGGCTGCATCCCCCTCATTAAGTCCATCAGCGACTGGACG |
| | GTAATTGCACTTGCAGCACTCTGGTTCTGCCTAATTGGCCTGATATGCCAAGCCCTGT |
| | GCTCTGAAGACGGCCACAAGAGAAGGATCCTTACTCTGGGCCTGGGATTTCTCGTTAT |
| | CCCATTTCTCCCTGCGAGTAACCTGTTCTTCCGAGTGGGCTTCGTGGTCGCGGAGCGT |
| | GTCCTCTACCTCCCCAGCGTTGGGTACTGTGTGCTGCTGACTTTTGGATTCGGAGCCC |
| | TGAGCAAACATACCAAGAAAAAGAAACTCATTGCCGCTGTCGTGCTGGGAATCTTATT |
| | CATCAACACGCTGAGATGTGTGCTGCGCAGCGGCGAGTGGCGGAGTGAGGAACAGCTT |
| | TTCAGAAGTGCTCTGTCTGTGTGTCCCCTCAATGCTAAGGTTCACTACAACATTGGCA |
| | AAAACCTGGCTGATAAAGGCAACCAGACAGCTGCCATCAGATACTACCGGGAAGCTGT |
| | AAGATTAAATCCCAAGTATGTTCATGCCATGAATAATCTTGGAAATATCTTAAAAGAA |
| | AGGAATGAGCTACAGGAAGCTGAGGAGCTCCTGTCTTTGGCTGTTCAAATACAGCCAG |
| | ACTTTGCCGCTGCGTGGATGAATCTAGGCATAGTGCACAATACCCTGAAACGCTTTGA |
| | AGCAGCAGAGCAAAGTTACCGGACAGCAATTAAACACAGAAGGAAATACCCAGACTGT |
| | TACTACAACCTCGGGCGTCTGTATGCAGATCTCAATCGCCACGTGGATGCCTTGAATG |
| | CGTGGAGAAATGCCACCGTGCTGAAACCAGAGCACAGCCTGGCCTGGAACAACATGAT |
| | TATACTCCTCGACAATACAGGTAATTTAGCCCAAGCTGAAGCAGTTGGAAGAGAGGCA |
| | CTGGAATTAATACCTAATGATCACTCTCTCATGTTCTCGTTGGCAAACGTGCTGGGGA |
| | AATCCCAGAAATACAAGGAATCTGAAGCTTTATTCCTCAAGGCAATTAAAGCAAATCC |
| | AAATGCTGCAAGTTACCATGGTAATTTGGCTGTGCTTTATCATCGTTGGGGACATCTA |
| | GACTTGGCCAAGAAACACTATGAAATCTCCTTGCAGCTTGACCCCACGGCATCAGGAA |
| | CTAAGGAGAATTACGGTCTGCTGAGAAGAAACCTAGAACTAATGCAAAAGAAAGCTGT |
| | CCTCGAG |

| | |
|---|---|
| ORF Start: at 1 | ORF Stop: end of sequence |

| | | |
|---|---|---|
| SEQ ID NO: 116 | 505 aa | MW at 57228.1 kD |

| | |
|---|---|
| NOV23b, | EFKFNVLEIVQKVLHKDKSLENLGMLRNGGLLFRMTLLTSGGAGMLYVRWRIMGTGPP |
| 167200132 | |
| Protein Sequence | AFTEVDNPASFADSMLVRAVNYNYYYSLNAWLLLCPWWLCFDWSMGCIPLIKSISDWR |
| | VIALAALWFCLIGLICQALCSEDGHKRRILTLGLGFLVIPFLPASNLFFRVGFVVAER |
| | VLYLPSVGYCVLLTFGFGALSKHTKKKKLIAAVVLGILFINTLRCVLRSGEWRSEEQL |
| | FRSALSVCPLNAKVHYNIGKNLADKGNQTAAIRYYREAVRLNPKYVHANNNLGNILKE |
| | RNELQEAEELLSLAVQIQPDFAAAWMNLGIVQNSLKRFEAAEQSYRTAIKHRRKYPDC |
| | YYNLGRLYADLNRHVDALNAWRNATVLKPEHSLAWNNMIILLDNTGNLAQAEAVGREA |
| | LELIPNDHSLMFSLANVLGKSQKYKESEALFLKAIKANPNAASYHGNLAVLYHRWGHL |
| | DLAKKHYEISLQLDPTASGTKENYGLLRRKLELMQKKAVLE |

| | |
|---|---|
| SEQ ID NO: 117 | 1515 bp |

| | |
|---|---|
| NOV23c, | GAATTCAAATTCAATGTTCTGGAAATTGTCCAGAAGGTACTACATAAGGACAAGTCAT |
| 167200144 DNA | |
| Sequence | TAGAGAATCTCGGCATGCTCAGGAACGGGGGCCTCCTCTTCAGAATGACCCTGCTCAC |
| | CTCTGGAGGCGCTGGGATGCTCTACGTGCGCTGGAGGATCATGGGCACGGGCCCGCCG |
| | GCCTTCACCGACCTCGACAACCCGGCCTCCTTTGCTGACAGCATGCTGGTGAGGGCCG |
| | TAAACTACAATTACTACTATTCATTCAATGCCTGGCTGCTGCTGTGTCCCTGGTGGCT |
| | GTGTTTTGATTGGTCAATGGGCTGCACCCCCCTCATTAAGTCCATCAGCGACTGGAGG |
| | GTAATTGCACTTGCAGCACTCTGGTTCTGCCTAATTGGCCTGATATGCCAAGCCCTGT |
| | GCTCTGAAGACGGCCACAAGAGAACGATCCTTACTCTGGGCCTGGGATTTCTCGTTAT |
| | CCCATTTCTCCCTGCGAGTAACCTGTTCTTCCGAGTGGGCTTCGTGGTCGCGGAGCGT |
| | GTCCTCTACCTCCCCAGCGTTGGGTACTGTGTGCTGCTGACTTTTGGATTCGGAGCCC |
| | TGAGCAAACATACCAAGAAAAAGAAACTCATTGCCGCTGTCGTGCTGGGAATCTTATT |
| | CATCAACACGCTGAGATGTGTGCTGCGCAGCGGCGAGTGGCGGAGTGAGGAACAGCTT |
| | TTCAGAACTCCTCTGTCTGTGTGTCCCCTCAATGCTAAGGTTCACTACAACATTGGCA |
| | AAAACCTGGCTGATAAAGGCAACCAGACAGCTGCCATCAGATACTACCGGGAAGCTGT |
| | AAGATTAAATCCCAAGTATGTTCATGCCATGAATAATCTTGGAAATATCTTAAAAGAA |
| | AGGAATGAGCTACAGGAAGCTGAGGAGCTGCTGTCTTTGGCTGTTCAAATACAGCCAG |
| | ACTTTGCCGCTGCGTGGATGAATCTAGGCATAGTGCAGAATAGCCTCAAACGGTTTGA |
| | AGCAGCAGAGCAAAGTTACCGGACAGCAATTAAACACAGAAGGAAATACCCAGACTGT |
| | TACTACAACCTCGGGCGTCTGTATGCAGATCTCAATCGCCACGTGGATGCCTTGAATG |
| | CGTGGAGAAATGCCACCGTGCTGAAACCAGAGCACAGCCTGGCCTGGAACAACATGAT |
| | TATACTCCTCGACAATACAGGTAATTTAGCCCAAGCTGAAGCAGTTGGAAGAGAGGCA |
| | CTGGAATTAATACCTAATGATCACTCTCTCATGTTCTCGTTGGCAAACGTGCTGGGGA |
| | AATCCCAGAAATACAAGGAATCTGAAGCTTTATTCCTCAAGGCAATTAAAGCAAATCC |
| | AAATGCTGCAAGTTACCATGGTAATTTGGCTGTGCTTTATCATCGTTGGGGGCATCTA |
| | GACTTGGCCAAGAAACACTATGAAATCTCCTTGCAGCTTGACCCCACGGCATCAGCAA |
| | CTAAGGAGAATTACGGTCTGCTGAGAAGAAAGCTAGAACTAATGCAAAAGAAAGCTGT |
| | CCTCGAG |

| | |
|---|---|
| ORF Start: at 1 | ORF Stop: end at sequence |

| | | |
|---|---|---|
| SEQ ID NO: 118 | 505 aa | MW at 57216.0 kD |

| | |
|---|---|
| NOV23c, | EFKFNVLEIVQKVLHKDKSLENLGMLRNGGLLFRMTLLTSGGAGMLYVRWRIMGTGPP |
| 167200144 | |
| Protein Sequence | AFTEVDNPASFADSMLVRAVNYNYYYSLNAWLLLCPWWLCFDWSMGCTPLIKSISDWR |
| | VIALAALWFCLIGLICQALCSEDGHKRRILTLGLGFLVIPFLPASNLFFRVGFVVAER |
| | VLYLPSVGYCVLLTFGFGALSKHTKKKKLIAAVVLGILFINTLRCVLRSGEWRSEEQL |
| | FRSALSVCPLNAKVHYNIGKNLADKGNQTAAIRYYREAVRLNPKYVHANNNLGNILKE |
| | RNELQEAEELLSLAVQIQPDFAAAWMNLGIVQNSLKRFEAAEQSYRTAIKHRRKYPDC |
| | YYNLGRLYADLNRHVDALNAWRNATVLKPEHSLAWNNMIILLDNTGNLAQAEAVGREA |
| | LELIPNDHSLMFSLANVLGKSQKYKESEALFLKAIKANPNAASYHGNLAVLYHRWGHL |
| | DLAKKHYEISLQLDPTASGTKENYGLLRRKLELMQKKAVLE |

| | |
|---|---|
| SEQ ID NO: 119 | 1515 bp |

| | |
|---|---|
| NOV23d, | GAATTCAAATTCAATGTTCTGGAAATTGTCCAGAAGGTACTACATAAGGACAAGTCAT |
| 169252408 DNA | |
| Sequence | TAGAGAATCTCGGCATGCTCAGGAACGGGGGCCTCCTCTTCAGAATGACCCTGCTCAC |
| | CTCTGGAGGGGCTGGGATGCTCTACGTGCGCTGGAGGATCATGGGCACGGGCCCGCCG |
| | GCCTTCACCGAGGTGGACAACCCGGCCTCCTTTGCTGACAGCATGCTGGTGAGGGCCG |
| | TAAACTACAATTACTACTATTCATTGAATGCCTGGCTGCTGCTGTGTCCCTGGTGGCT |
| | GTGTTTTGATTGGTCAATGGGCTGCATCCCCCTCATTAAGTCCATCAGCGACTGGAGG |
| | GTAATTGCACTTGCAGCACTCTGGTTCTGCCTAATTGGCCTGATATGCCAAGCCCTGT |
| | GCTCTGAAGACGGCCACAAGAGAAGGATCCTTACTCTGGGCCTGAGGATTTCTCGTTAT |
| | CCCATTTCTCCCTGCGAGTAACCTGTTCTTCCGAGTGGGCTTCGTGGTCGCGGAGCGT |
| | GTCCTCTACCTCCCCAGCGTTGGGTACTGTGTGCTGCTGACTTTTGGATTCGGAGCCC |
| | TGAGCAAACATACCAAGAAAAAGAAACTCATTGCCGCTGTCGTGCTGGGAATCTTATT |
| | CATCAACACGCTGAGATGTGTGCTGCGCAGCGGCGAGTGGCGGAGTGAGGAACAGCTT |
| | TTCAGAAGTGCTCTGTCTGTGTGTCCCCTCAATGCTAAGGTTCACTACAACATTGGCA |
| | AAAACCTGGCTGATAAAGGCAACCAGACAGCTGCCATCAGATACTACCGGGAGGCTGT |
| | AAGATTAAATCCCAAGTATGTTCATGCCATGAATAATCTTGGAAATATCTTAAAAGAA |
| | AGGAATGAGCTACAGGAAGCTGAGGAGCTGCTGTCTTTGGCTGTTCAAATACAGCCAG |
| | ACTTTGCCGCTGCGTGGATGAATCTAGGCATAGTGCAGAATAGCCTGAAACGGTTTGA |
| | AGCAGCAGACCAAAGTTACCGGACAGCAATTAAACACAGAAGGAAATACCCAGACTGT |
| | TACTACAACCTCGGGCGTCTGTATGCAGATCTCAATCGCCACGTGGATGCCTTGAATG |
| | CGTGGAGAAATGCCACCGTGCTGAAACCAGAGCACAGCCTGGCCTGGAACAACATGAT |
| | TACACTCCTCGACAATACAGGTAATTTAGCCCAAGCTGAAGCAGTTGGAAGAGAGGCA |
| | CTGGAATTAATACCTAATGATCACTCTCTCATGTTCTCGTTGGCAAACGTGCTGGGGA |
| | AATCCCAGAAATACAAGGAATCTGAAGCTTTATTCCTCAAGGCAATTAAAGCAAATCC |
| | AAATGCTGCAAGTTACCATGGTAATTTGGCTGTGCTTTATCATCGTTGGGGACATCTA |
| | GACTTGGCCAAGAAACACTATGAAATCTCCTTGCAGCTTGACCCCACGGCATCAGGAA |
| | CTAAGGAGAATTACGGTCTGCTGAGAAGAAAGCTAGAACTAATGCAAAAGAAAGCTGT |
| | CCTCGAG |

| | |
|---|---|
| ORF Start: at 1 | ORF Stop: end of sequence |

| | | |
|---|---|---|
| SEQ ID NO: 120 | 505 aa | MW at 57216.0 kD |

| | |
|---|---|
| NOV23d, | EFKFNVLEIVQKVLHKDKSLENLGMLRNGGLLFRMTLLTSGGAGMLYVRWRIMGTCPP |
| 169252408 | |
| Protein Sequence | AFTEVDNPASFADSMLVRAVNYNYYYSLNAWLLLCPWWLCFDWSMGCIPLIKSISDWR |
| | VIALAALWFCLIGLICQALCSEDGHKRRILTLGLGFLVIPFLPASNLFFRVGFVVAER |
| | VLYLPSVGYCVLLTFGFGALSKHTKKKKLIAAVVLGILFINTLRCVLRSGEWRSEEQL |
| | FRSALSVCPLNAKVHYNIGKNLADKGNQTAAIRYYREAVRLNPKYVHAMNNLGNILKE |
| | RNELQEAEELLSLAVQIQPDFAAAWMNLGIVQNSLKRFEAAEQSYRTAIKHRRKYPDC |
| | YYNLGRLYADLNRHVDALNAWRNATVLKPEHSLAWNNMITLLDNTGNLAQAEAVGREA |
| | LELIPNDHSLMFSLANVLGKSQKYKESEALFLKAIKANPNAASYHGNLAVLYHRWGHL |
| | DLAKKHYEISLQLDPTASGTKENYGLLRRKLELMQKKAVLE |

| | |
|---|---|
| SEQ ID NO: 121 | 1515 bp |

| | |
|---|---|
| NOV23e, | GAATTCAAATTCAATGTTCTGGAAATTGTCCAGAAGGTACTACATAAGGACAAGTCAT |
| 169252412 DNA | |
| Sequence | TAGAGAATCTCGGCATGCTCAGGAACGGGGGCCTCCTCTTCAGAATGACCCTGCTCAC |
| | CTCTGGAGGGGCTGGGATGCTCTACGTGCGCTGCACGATCATGGGCACGGGCCCGCCG |
| | GCCTTCACCGAGGTGGACAACCCGGCCCCCTTTGCTGACACCATGCTGGTGAGGGCCG |
| | TAAACTACAATTACTACTATTCATTGAATGCCTGGCTGCTGCTGTGTCCCTGGTGGCT |
| | GTGTTTTGATTGGTCAATGGGCTGCATCCCCCTCATTAAGTCCATCAGCGACTGGAGG |
| | GTAATTGCACTTGCAGCACTCTGGTTCTGCCTAATTGGCCCGATATGCCAAGCCCTGT |
| | GCTCTGAAGACGGCCACAAGAGAAGGATCCTTACTCTGGGCCTGGGATTTCTCGTTAT |
| | CCCATTTCTCCCTGCGAGTAACCTGTTCTTCCCAGTGGGCTTCGTGGTCGCGGAGCGT |
| | GTCCTCTACCTCCCCAGCGTTGGGTACTGTGTUCTGCTCACTTTTGGATTCGGAGCCC |
| | TGAGCAAACATACCAAGAAAAAGAAACTCATTGCCGCTGTCGTGCTGCCAATCTTATT |
| | CATCAACACGCTGAGATGTGTGCTGCGCAGCGGCGAGTGGCGGACTGAGCAACAGCTT |
| | TTCAGAAGTGCTCTGTCTGTGTGTCCCCTCAATGCTAAGGTTCACTACAACATTGCCA |
| | AAAACCTGGCTGATAAAGGCAACCAGACAGCTGCCATCAGATACTACCGGCAAGCTGT |
| | AAGATTAAATCCCAAGTATGTTCATGCCATGAATAATCTTGGAAATATCTTAAAAGAA |
| | AGGAATGAGCTACAGGAAGCTGAGGAGCTGCTGTCTTTGGCTGTTCAAATACAGCCAC |
| | ACTTTGCCGCTGCCTGGATGAATCTAGGCATAGTGCAGAATAGCCTGAAACGGTTTGA |
| | AGCAGCAGAGCAAAGTTACCGGACAGCAATTAAACACAGAAGGAAATACCCAGACTGT |
| | TACTACAACCTCGGGCGTCTGTATGCAGATCTCAATCCCCACGTGGATGCCTTGAATG |
| | CGTGGAGAAATGCCACCGTGCTGAAACCAGAGCACAGCCTGGCCTGGAACAACATGAT |
| | TATACTCCTCGACAATACAGGTAATTTAGCCCAAGCTGAAGCAGTTGGAACAGAGGCA |
| | CTGGAATTAATACCTAATGATCACTCTCTCATGTTCTCGTTGGCAAACGTGCTGCGCA |
| | AATCCCAGAAATACAAGGAATCTGAAGCTTTATTCCTCAAGGCAATTAAAGCAAATCC |
| | AAATGCTGCAAGTTACCATGGTAATTTGGCTGTGCTTTATCATCGTTGGGGACATCTA |
| | GACTTGGCCAAGAAACACTATGAAATCTCCTTGCAGCTTGACCCCACGGCATCAGGAA |
| | CTAAGGAGAATTACGGTCTGCTGAGAAGAAAGCTAGAACTAATGCAAAAGAAAGCTGT |
| | CCTCGAG |

| | |
|---|---|
| ORF Start: at 1 | ORF Stop: end of sequence |

| | | |
|---|---|---|
| SEQ ID NO: 122 | 505 aa | MW at 57222.1 kD |

| | |
|---|---|
| NOV23e, | EFKFNVLEIVQKVLHKDKSLENLGMLRNGGLLFRMTLLTSGGAGMLYVRWRIMGTGPP |
| 169252412 | |
| Protein Sequence | AFTEVDNPAPFADSMLVRAVNYNYYYSLNAWLLLCPWWLCFDWSMGCIPLIKSISDWR |
| | VIALAALWFCLIGPICQALCSEDGHKRRILTLGLGFLVIPFLPASNLFFRVGFVVAER |
| | VLYLPSVGYCVLLTFGFGALSKHTKKKKLIAAVVLGILFINTLRCVLRSGEWRSEEQL |
| | FRSALSVCPLNAKVHYNIGKNLADKGNQTAAIRYYREAVRLNPKYVHANNNLGNILKE |
| | RNELQEAEELLSLAVQIQPDFAAAWMNLGIVQNSLKRFEAAEQSYRTAIKHRRKYPDC |
| | YYNLGRLYADLNRHVDALNAWRNATVLKPEHSLAWNNMIILLDNTGNLAQAEAVGREA |
| | LELIPNDHSLMFSLANVLGKSQKYKESEALFLKAIKANPNAASYHGNLAVLYHRWGHL |
| | DLAKKHYEISLQLDPTASGTKENYGLLRRKLELMQKKAVLE |

| | |
|---|---|
| SEQ ID NO: 123 | 1515 bp |

| | |
|---|---|
| NOV23f, | GAATTCAAATTCAATGTTCTGGAAATTGTCCAGAAGGTACTACATAAGGACAAGTCAT |
| 169252424 DNA | |
| Sequence | TAGAGAATCTCGGCATGCTCAGGAACGGGGGCCTCCTCTTCAGAATGACCCTGCTCAC |
| | CTCTGGAGGGGCTGGGATGCTCTACGTGCGCTGGAGGATCATGGGCACGGGCCCGCCG |
| | GCCTTCACCGAGGTGGACAACCCGGCCTCCTTTGCTGACAGCATGCTGGTGAGGGCCG |
| | TAAACTACAATTACTACTATTCATTGAATGCCTGGCTGCTGCTGTGTCCCTGGTGGCT |
| | GTGTTTTGATTGGTCAATGGGCTGCATCCCCCTCATTAAGTCCATCAGCGACTGGAGG |
| | GTAATTGCACTTGCAGCACTCTGGTTCTGCCTAATTGGCCTGATATGCCAAGCCCTGT |
| | GCTCTGAAGACGGCCACAAGAGAAGGATCCTTACTCTGGGCCTGGGATTTCTCGTTAT |
| | CCCATTTCTCCCTCCCAGTAACCTGTTCTTCCGAGTGGGCTTCGTGGTCGCGGAGCGT |
| | GTCCTCTACCTCCCCAGCGTTGGGTACTGTGTGCTGCTGACTTTTGGATTCGGAGCCC |
| | TGAGCAAACATACCAAGAAAAAGAAACTCATTGCCGCTGTCGTGCTGGGAATCTTATT |
| | CATCAACACGCTGAGATGTGTGCTGCGCAGCGGCGAGTGGCGGAGTGAGGAACAGCTT |
| | TTCAGAAGTGCTCTGTCTGTGTGTCCCCTCAATGCTAAGGTTCACTACAACATTGGCA |
| | AAAACCTGGCTGATAAACGCAACCAGACAGCTGCCATCAGATACTACCCCGAAGCTGT |
| | AAGATTAAATCCCAAGTATGTTCATGCCATGAATAATCTTGGAAATATCTTAAAAGAA |
| | AGGAATGAGCTACAGGAAGCTGAGGAGCTGCTGTCTTTGGCTGTTCAAATACAGCCAG |
| | ACTTTGCCGCTGCGTGGATGAATCTAGGCATAGTGCAGAATAGCCTGAAACGGTTTGA |
| | AGCAGCAGAGCAAAGTTACCGGACAGCAATTAAACACAGAAGGAAATACCCAGACTGT |
| | TACTACAACCTCGGGCGTCTGTATGCAGATCTCAATCGCCACGTGGATGCCTTCAATG |
| | CGTGGAGAAATGCCACCGTGCTGAAACCAGAGCACAGCCTGGCCTGGAACAACATGAT |
| | TATACTCCTCGACAATACAGGTAATTTAGCCCAAGCTGAAGCAGTTGGAAGAGAGGCA |
| | CTGGAATTAATACCTAATGATCACTCTCTCATGTTCTCGTTGGCAAACGTGCTGGGGA |
| | AATCCCAGAAATACAAGGAATCTGAAGCTTTATTCCTCAAGGCAATTAAAGCAAATCC |
| | AAATGCTGCAAGTTACCATGGTAATTTGGCTGTGCTTTATCATCGTTGGGGACATCTA |
| | GACTTGGCCAAGAAACACTATGAAATCTCCTTGCAGCTTGACCCCACGGCATCAGGAA |
| | CTAAGGAGAATTACGGTCTGCTGAGAGGAAAGCTAGAACTAATGCAAAAGAAAGCTGT |
| | CCTCGAG |

| | |
|---|---|
| ORF Start: at 1 | ORF Stop: end of sequence |

| | | |
|---|---|---|
| SEQ ID NO: 124 | 505 aa | MW at 57128.9 kD |

| | |
|---|---|
| NOV23t, | EFKFNVLEIVQKVLHKDKSLENLGMLRNGGLLFRMTLLTSGGAOMLYVRWRIMGTGPP |
| 169252424 | |
| Protein Sequence | AFTEVDNPASFADSMLVRAVNYNYYYSLNAWLLLCPWWLCFDWSMGCIPLIKSISDWR |
| | VIALAALWFCLICLICQALCSEDGHKRRILTLGLGFLVIPFLPASNLFFRVGFVVAER |
| | VLYLPSVGYCVLLTFGFGALSKHTKKKKLIAAVVLGILFINTLRCVLRSGEWRSEEQL |
| | FRSALSVCPLNAKVHYNIGKNLADKGNQTAAIRYYREAVRLNPKYVHAMNNLGNILKE |
| | RNELQEAEELLSLAVQIQPDFAAAWMNLGIVQNSLKRFEAAEQSYRTAIKHRRKYPDC |
| | YYNLGRLYADLNRHVDALNAWRNATVLKPEHSLAWNNMIILLDNTGNLAQAEAVGREA |
| | LELIPNDHSLMFSLANVLGKSQKYKESEALFLKAIKANPNAASYHGNLAVLYHRWGHL |
| | DLAKKHYEISLQLDPTASGTKENYGLLRGKLELMQKKAVLE |

| | |
|---|---|
| SEQ ID NO: 125 | 1515 bp |

| | |
|---|---|
| NOV23 g, | GAATTCAAATTCAATGTTCTGGAAATTGTCCAGAAGGTACTACATAAGGACAAGTCAT |
| 169252469 DNA | |
| Sequence | TAGAGAATCTCGGCATGCTCAGGAACGGGGGCCTCCTCTTCAGAATGACCCTGCTCAC |
| | CTCTGGAGGGGCTGGGATGCTCTACGTGCGCTGGAGGATCATGGGCACGGGCCCGCCG |
| | GCCTTCACCGAGGTGGACAACCCGGCCTCCTTTGCTGACAGCATGCTGGTGAGGGCCG |
| | TAAACTACAATTACTACTATTCATTGAATGCCTGGCTGCTGCTGTGTCCCTGGTGGCT |
| | GTGTTTTGATTGGTCAATGGGCTGCATCCCCCTCATTAAGTCCATCAGCGACTGGAGG |
| | GTAATTGCACTTGCAGCACTCTGGTTCTGCCTAATTGGCCTGATATGCCAAGCCCTGT |
| | GCTCTGAAGACGGCCACAAGAGAAGGATCCTTACTCTGGGCCTGGGATTTCTCGTTAT |
| | CCCATTTCTCCCCGCGAGTAACCTGTTCTTCCGAGTGGGCTTCGTGGTCGCGGAGCGT |
| | GTCCTCTACCTCCCCAGCGTTGGGTACTGTGTGCTGCTGACTTTTGGATTCGGAGCCC |
| | TGAGCAAACATACCAAGAAAAAGAAACTCATTGCCGCTGTCGTGCTGGGAATCTTATT |
| | CATCAACACGCTGAGATGTGTGCTGCGCAGCGGCGAGTGGCGGAGTGAGGAACAGCTT |
| | TTCAGAAGTGCTCTGTCTGTGTGTCCCCTCAATGCTAAGGTTCACTACAACATTGGCA |
| | AAAACCTGGCTGATAAAGGCAACCAGACAGCTGCCATCACATACTACCGGGAAGCTGT |
| | AAGATTAAATCCCAAGTATGTTCATGCCATGAATAATCTTGGAAATATCTTAAAAGAA |
| | AGGAATGAGCTACAGGAAGCTGAGGAGCTGCTGTCTTTGGCTGTTCAAATACAGCCAG |
| | ACTTTGCCGCTGCGTCCATGAATCTAGGCATAGTGCAGAATAGCCTGAAACGGTTTGA |
| | AGCAGCAGAGCAAAGTTACCGGACAGCAATTAAACACAGAAGGAAATACCCAGACTGT |
| | TACTACAACCTCGGGCGTCTGTATGCAGATCTCAATCGCCACGTGGATGCCTTGAATG |
| | CGTGGAGAAATGCCACCGTGCTGAAACCAGAGCACAGCCTGGCCTGGAACAACATGAT |
| | TATACTCCTCGACAATACAGGTAATTTAGCCCAAGCTGAAGCAGTTGGAAGAGAGGCA |
| | CTGGAATTAATACCTAATGATCACTCTCTCATGTTCTCGTTGGCAAACGTGCTGGGGA |
| | AATCCCAGAAATACAAGCAATCTGAAGCTTTATTCCTCAAGGCAATTAAAGCAAATCC |
| | AAATCCTGCAAGTTACCATGGTAATTTGGCTGTGCTTTATCATCGTTGGGGACATCTA |
| | GACTTGGCCAAGAAACACTATGAAATCTCCTTGCAGCTTGACCCCACGGCATCAGGAA |
| | CTAAGGAGAATTACGGTCTGCTGAGAAGAAAGCTAGAACTAATGCAAAAGAAAGCTGT |
| | CCTCGAG |

| | |
|---|---|
| ORF Start: at 1 | ORF Stop: end of sequence |

| | | |
|---|---|---|
| SEQ ID NO: 126 | 1505 aa | W at 57228.1 kD |

| | |
|---|---|
| NOV23g, | EFKFNVLEIVQKVLHKDKSLENLGMLRNGGLLFRMTLLTSGGAGMLYVRWRIMGTGPP |
| 169252469 | |
| Protein Sequence | AFTEVDNPASFADSMLVRAVNYNYYYSLNAWLLLCPWWLCFDWSMGCIPLIKSISDWR |
| | VIALAALWFCLICLICQALCSEDGHKRRILTLGLGFLVIPFLPASNLFFRVGFVVAER |
| | VLYLPSVGYCVLLTFGFGALSKHTKKKKLIAAVVLGILFINTLRCVLRSGEWRSEEQL |
| | FRSALSVCPLNAKVHYNIGKNLADKGNQTAAIRYYREAVRLNPKYVHAMNNLGNILKE |
| | RNELQEAEELLSLAVQIQPDFAAAWMNLGIVQNSLKRFEAAEQSYRTAIKHRRKYPDC |
| | YYNLGRLYADLNRHVDALNAWRNATVLKPEHSLAWNNMIILLDNTGNLAQAEAVGREA |
| | LELIPNDHSLMFSLANVLGKSQKYKESEALFLKAIKANPNAASYNGNLAVLYHRWGHL |
| | DLAKKHYEISLQLDPTASGTKENYGLLRRKLELMQKKAVLE |

| | |
|---|---|
| SEQ ID NO: 127 | 1515 bp |

| | |
|---|---|
| NOV23h, | GAATTCAAATTCAATGTTCTGGAAATTGTCCAGAAGGTACTACATAAGGACAAGTCAT |
| 169252475 DNA | |
| Sequence | TAGAGAATCTCGGCATGCTCAGGAACGGGGGCCTCCTCTTCAGAATGACCCTGCTCAC |
| | CTCTGGAGGGGCTGGGATGCTCTACGTGCGCTGGAGGATCATGGGCACGGGCCCGCCG |
| | GCCTTCACCGAGGTGGACAACCCGGCCTCCTTTGCTGACAGCATGCTGGTGAGGGCCG |
| | TAAACTACAATTACTACTATTCATTGAATGCCTGGCTGCTGCTGTGTCCCTGGTGGCT |
| | GTGTTTTGATTGGTCAATGGGCTGCATCCCCCTCATTAAGTCCATCAGCGACTGGAGG |
| | GTAATTGCACTTGCAGCACTCTGGTTCTGCCTAATTGGCCTGATATGCCAAGCCCTGT |
| | GCTCTGAAGACGGCCACAAGAGAAGGATCCTTACTCTGGGCCTGCGATTTCTCGTTAT |
| | CCCATTTCTCCCCGCGAGTAACCTGTTCTTCCGAGTGGGCTTCGTGGTCGCGGAGCGT |
| | GTCCTCTACCTCCCCAGCGTTGGGTACTGTGTGCTGCTGACTTTTGGATTCGGAGCCC |
| | TGAGCAAACATACCAAGAAAAAGAAACTCATTGCCGCTGTCGTGCTGGGAATCTTATT |
| | CATCAACACGCTGAGATGTGTGCTGCGCAGCGGCGAGTGGCGGAGTGAGGAACAGCTT |
| | TTCAGAAGTGCTCTGTCTGTGTGTCCCCTCAATGCTAAGGTTCACTACAACATTGGCA |
| | AAAACCTGGCTGATAAAGGCAACCAGACAGCAGCCATCAGATACTACCGGGAAGCTGT |
| | AAGATTAAATCCCAAGTATGTTCATGCCATGAATAATCTTGGAAATATCTTAAAAGAA |
| | AGGAATGAGCTACAGGAAGCTGAGGAGCTGCTGTCTTTGGCTGTTCAAATACAGCCAG |
| | ACTTTGCCGCTGCGTGGATGAATCTAGGCATAGTGCAGAATAGCCTGAAACGGTTTGA |
| | AGCAGCAGAGCAAAGTTACCGGACAGCAATTAAACACAGAAGGAAATACCCAGACTGT |
| | TACTACAACCTCGGGCGTCTGTATGCAGATCTCAATCGCCACGTGGATGCCTTGAATG |
| | CGTGCACAAATGCCACCGTGCTGAAACCAGACCACAGCCTGGCCTCGAACAACATGAT |
| | TATACTCCTCGACAATACAGGTAATTTAGCCCAAGCTGAAGCAGTTGGAAGAGAGGCA |
| | CTGGAATTAATACCTAATGATCACTCTCTCATGTTCTCGTTGGCAAACGTGCTGGGGA |
| | AATCCCAGAAATACAAGGAATCTGAAGCTTTATTCCTCAAGGCAATTAAAGCAAATCC |
| | AAATGCTGCAAGTTACCATGGTAATTTGGCTGTGCTTTATCATCGTTGGGGACATCTA |
| | GGCTTGGCCAAGAAACACTATGAAATCTCCTTGCAGCTTGACCCCACGGCATCAGGAA |
| | CTAAGGAGAATTACGGTCTGCTGAGAAGAAAGCTAGAACTAATGCAAAAGAAAGCTGT |
| | CCTCGAG |

| | |
|---|---|
| ORF Start: at 1 | ORF Stop: end of sequence |

| | | |
|---|---|---|
| SEQ ID NO: 128 | 505 aa | MW at 57170.1 kD |

| | |
|---|---|
| NOV23h, | EFKFNVLEIVQKVLHKDKSLENLGMLRNGGLLFRMTLLTSGGAGMLYVRWRIMGTGPP |
| 169252475 | |
| Protein Sequence | AFTEVDNPASFADSMLVRAVNYNYYYSLNAWLLLCPWWLCFDWSMGCIPLIKSISDWR |
| | VIALAALWFCLIGLICQALCSEDGHKRRILTLGLGFLVIPFLPASNLFFRVGFVVAER |
| | VLYLPSVGYCVLLTFGFGALSKHTKKKKLIAAVVLGILFINTLRCVLRSGEWRSEEQL |
| | FRSALSVCPLNAKVHYNIGKNLADKGNQTAAIRYYREAVRLNPKYVHAMNNLGNILKE |
| | RNELQEAEELLSLAVQIQPDFAAAWMNLGIVQNSLKRFEAAEQSYRTAIKHRRKYPDC |
| | YYNLGRLYADLNRHVDALNAWRNATVLKPEHSLAWNNMIILLDNTGNLAQAEAVGREA |
| | LELIPNDHSLMFSLANVLGKSQKYKESEALFLKAIKANPNAASYHGNLAVLYHRWGHL |
| | GLAKKHYEISLQLDPTASGTKENYGLLRRKLELMQKKAVLE |

| | |
|---|---|
| SEQ ID NO: 129 | 1515 bp |

| | |
|---|---|
| NOV23i, | GAATTCAAATTCAATGTTCTGGAAATTGTCCAGAAGGTACTACATAAGGACAAGTCAT |
| 169252481 DNA | |
| Sequence | TAGAGAATCTCGGCATGCTCAGGAACGGGGGCCTCCTCTTCAGAATGACCCTGCTCAC |
| | CTCTGGAGGGGCTGGGATGCTCTACGTGCGCTGGAGGATCATGGGCACGCGCCCGCCG |
| | GCCTTCACCGAGGTGGACAACCCGGCCTCCTTTGCTGACAGCATGCTGGTGAGGGCCG |
| | TAAACTACAATTACTACTATTCATTGAATGCCTGGCTGCTGCTGTGTCCCTGGTGGCT |
| | GTGTTTTGATTGGTCAATGGGCTGCATCCCCCTCATTAAGTCCATCAGCGACTGGAGG |
| | GTAATTGCACTTGCAGCACTCTGGTTCTGCCTAATTGGCCTGATATGCCAAGCCCTGT |
| | GCTCTGAAGACGGCCACAAGAGAAGGATCCTTACTCTGGGCCTGGGATTTCTCGTTAT |
| | CCCATTTCTCCCCGCGAGTAACCTGTTCTTCCGAGTGGGCTTCGTGGTCGCAGAGCGT |
| | GTCCTCTACCTCCCCACCGTTGGGTACTGTGTGCTGCTGACTTTTGGATTCGGAGCCC |
| | TGAGCAAACATACCAACAAAAAGAAACTCATTGCCGCTGTCGTGCTGGGAATCTTATT |
| | CATCAACACGCTGAGATGTGTGCTGCGCAGCGGCGAGTGGCGGAGTGAGGAACAGCTT |
| | TTCAGAAGTGCTCTGTCTGTGTGTCCCCTCAATGCTAAGGTTCACTACAACATTGGCA |
| | AAAACCTGGCTGATAAAGGCAACCAGACAGCTGCCATCAGATACTACCGGGAAGCTGT |
| | AAGATTAAATCCCAAGTATGTTCATGCCATGAATAATCTTGGAAATATCTTAAAAGAA |
| | AGGAATGAGCTACAGGAAGCTGAGGAGCTGCTGTCTTTGGCTGTTCAAATACAGCCAG |
| | ACTTTGCCGCTGCGTGGATGAATCTAGGCATAGTGCAGAATAGCCTGAAACGGTTTGA |
| | AGCAGCAGAGCAAAGTTACCGGACAGCAATTAAACACAGAAGGAAATACCCAGACTGT |
| | TACTACAACCTCGGGCGTCTGTATGCAGATCTCAATCGCCACGTGGATGCCTTGAATG |
| | CGTGGAGAAATGCCACCGTGCTGAAACCAGAGCACAGCCTGGCCTGGAACAACATGAT |
| | TATACTCCTCCACAATACAGGTAATTTAGCCCAAGCTGAAGCAGTTGGAAGAGAGGCA |
| | CTGGAATTAATACCTAATGATCACTCTCTCATGTTCTCGTTCGCAAACGTGCTGGGGA |
| | AATCCCAGAAATACAAGGAATCTGAAGCTTTATTCCTCAAGCCAATTAAAGCAAATCC |
| | AAATGCTGCAAGTTACCGTGGTAATTTGGCTGTGCTTTATCATCGTTGGGGACATCTA |
| | GACTTGGCCAAGAAACACTATGAAATCTCCTCGCACCTTGACCCCACGGCATCAGGAA |
| | CTAAGGAGAATTACGGTCTGCTGAGAAGAAAGCTAGAACTAATGCAAAAGAAAGCTGT |
| | CCTCGAG |

| | |
|---|---|
| ORF Start: at 1 | ORF Stop: end of sequence |

| | | |
|---|---|---|
| SEQ ID NO: 130 | 505 aa | MW at 57221.0 kD |

| | |
|---|---|
| NOV23i, | EFKFNVLEIVQKVLHKDKSLENLGMLRNGGLLFRMTLLTSGGAGMLYVRWRIMGTCPP |
| 169252481 | |
| Protein Sequence | AFTEVDNPASFADSMLVRAVNYNYYYSLNAWLLLCPWWLCFDWSMCCIPLIKSISDWR |
| | VIALAALWFCLIGLICQALCSEDGHKRRILTLGLGFLVIPFLPASNLFFRVGFVVAER |
| | VLYLPSVGYCVLLTFGFGALSKHTKKKKLIAAVVLGILFINTLRCVLRSGEWRSEEQL |
| | FRSALSVCPLNAKVHYNIGKNLADKGNQTAAIRYYREAVRLNPKYVHANNNLGNILKE |
| | RNELQEAEELLSLAVQIQPDFAAAWMNLGIVQNSLKRFEAAEQSYRTAIKHRRKYPDC |
| | YYNLGRLYADLNRHVDALNAWRNATVLKPEHSLAWNNMIILLDNTGNLAQAEAVGREA |
| | LELIPNDHSLMFSLANVLGKSQKYKESEALFLKAIKANPNAASYRGNLAVLYHRWGHL |
| | DLAKKHYEISSQLDPTASGTKENYGLLRRKLELMQKKAVLE |

| | |
|---|---|
| SEQ ID NO: 131 | 1515 bp |

| | |
|---|---|
| NOV23j, | GAATTCAAATTCAATGTTCTGGAAATTGTCCAGAAGGTACTACATAAGGACAAGTCAT |
| 169252485 DNA | |
| Sequence | TAGAGAATCTCGGCATGCTCAGGAACGGGGGCCTCCTCTTCAGAATGACCCTGCTCAC |
| | CTCTGGAGGGGCTGGGATACTCTACGTGCGCTGGAGGATCATGGGCACGGGCCCGCCG |
| | GCCTTCACCGAGGTGGACAACCCGGCCTCCTTTGCTGACAGCATGCTGGTGAGGGCCG |
| | TAAACTACAATTACTACTATTCATTGAATGCCTGGCTCCTGCTGTGTCCCTGGTGGCT |
| | GTGTTTTGATTGGTCAATGGGCTGCATCCCCCTCATTAAGTCCATCAGCGACTGGAGG |
| | GTAATTGCACTTGCAGCACTCTCGTTCTGCCTAATTGGCCTGATATGCCAAGCCCTGT |
| | GCTCTGAAGACGGCCACAAGAGAAGGATCCTTACTCTGGGCCTGGGATTTCTCGTTAT |
| | CCCATTTCTCCCCGCGAGTAACCTGTTCTTCCGAGTGGGCTTCGTGGTCGCAGAGCGT |
| | GTCCTCTACCTCCCCAGCGTTGGGTACTGTGTGCTGCTGACTTTTGGATTCGGAGCCC |
| | TGAGCAAACATACCAAGAAAAAGAAACTCATTGCCGCTGTCGTGCTGGGAATCTTATT |
| | CATCAACACGCTGAGATGTGTGCTGCGCAGCGGCGAGTGGCGGAGTGAGGAACAGCTT |
| | TTCAGAAGTGCTCTGTCTGTGTGTCCCCTCAATGCTAAGGTTCACTACAACATTGGCA |
| | AAAACCTGGCTGATAAAGGCAACCAAACAGCTGCCATCAGATACTACCGGGAAGCTGT |
| | AAGATTAAATCCCAAGTATGTTCATGCCATGAATAATCTTGGAAATATCTTAAAAGAA |
| | AGGAATGAGCTACAGGAAGCTGAGGAGCTGCTGTCTTTGGCTGTTCAAATACAGCCAG |
| | ACTTTGCCGCTGCGTGGATGAATCTAGGCATAGTGCAGAATAGCCTGAAACGGTTTGA |
| | AGCAGCAGAGCAAAGTTACCGGACAGCAATTAAACACAGAAGGAAATACCCAGACTGT |
| | TACTACAACCTCGGGCGTCTGTATCCAGATCTCAATCGCCACGTGGATGCCTTGAATG |
| | CGTGGAGAAATGCCACCGTGCTGAAACCAGAGCACAGCCTGGCCTGGAACAACATGAT |
| | TATACTCCTCGACAATACAGGTAATTTAGCCCAAGCTGAACCAGTTGGAAGAGAGGCA |
| | CTGGAATTAATACCTAATGATCACTCTCTCATGTTCTCGTTGGCAAACGTGCTGGGGA |
| | ATCCCAGAAATACAAGGAATCTGAAGCTTTATTCCTCAAGGCAATTAAAGCAAATCC |
| | AAATGCTGCAAGTTACCATGGTAATTTGGCTGTGCTTTATCATCGTTGGGGACATCTA |
| | GACTTGGCCAAGAAACACTATGAAATCTCCTTGCAGCTTGACCCCACGGCATCAGGAA |
| | CTAAGGAGAATTACGGTCTGCTGAGAAGAAAGCTAGAACTAATGCAAAAGAAAGCTGT |
| | CCTCGAG |

| | |
|---|---|
| ORF Start: at 1 | ORF Stop: end of sequence |

| | | |
|---|---|---|
| SEQ ID NO: 132 | 505 aa | MW at 57210.0 kD |

| | |
|---|---|
| NOV23j, | EFKFNVLEIVQKVLHKDKSLENLGMLRNGGLLFRMTLLTSGGAGILYVRWRIMGTGPP |
| 169252485 | |
| Protein Sequence | AFTEVDNPASFADSMLVRAVNYNYYYSLNAWLLLCPWWLCFDWSMGCIPLIKSISDWR |
| | VIALAALWFCLIGLICQALCSEDGNKRRILTLOLGFLVIPFLPASNLFFRVGFVVAER |
| | VLYLPSVGYCVLLTFGFGALSKHTKKKKLIAAVVLGILFINTLRCVLRSGEWRSEEQL |
| | FRSALSVCPLNAKVHYNIGKNLADKGNQTAAIRYYREAVRLNPKYVHAMNNLGNILKE |
| | RNELQEAEELLSLAVQIQPDFAAAWMNLGIVQNSLKRFEAAEQSYRTAIKHRRKYPDC |
| | YYNLGRLYADLNRHVDALNAWRNATVLKPEHSLAWNNMIILLDNTGNLAQAEAVGREA |
| | LELIPNDHSLMFSLANVLGKSQKYKESEALFLKAIKANPNAASYHGNLAVLYNRWGHL |
| | DLAKKHYEISLQLDPTASGTKENYGLLRRKLELMQKKAVLE |

| | |
|---|---|
| SEQ ID NO: 133 | 1515 bp |

| | |
|---|---|
| NOV23k, | GAATTCAAATTCAATGTTCTGGAAATTGTCCAGAAGGTACTACATAAGGACAAGTCAT |
| 169252492 DNA | |
| Sequence | TAGAGAATCTCGGCATGCTCAGGAACGGGGGCCTCCTCTTCAGAATGACCCTGCTCAC |
| | CTCTGGAGGGGCTGGGATGCTCTACGTGCGCTGGAGGATCATGGGCACGGGCCCGCCG |
| | GCCTTCACCGAGGTGGACAACCCGGCCTCCTTTGCTGACAGCATGCTGGTGAGGGCCG |
| | TAAACTACAATTACTACTATTCATTGAATGCCTGGCTGCTGCTGTGTCCCTGGTGGCT |
| | GTGTTTTGATTGGTCAATGGGCTGCATCCCCCTCATTAAGTCCATCAGCGACTGGAGG |
| | GTAATTGCACTTGCAGCACTCTGGTTCTGCCTAATTGGCCTGATATGCCAAGCCCTGT |
| | GCTCTGAAGACGGCCACAAGAGAAGGATCCTTACTCTGGGCCTGGGATTTCTCGTTAT |
| | CCCATTTCTCCCCGCGAGTAACCTGTTCTTCCGAGTGGGCTTCGTGGTCGCGGAGCGT |
| | GTCCTCTACCTCCCCAGCATTGGGTACTGTGTGCTGCTGACTTTTGGATTCGGAGCCC |
| | TGAGCAAACATACCAAGAAAAAGAAACTCATTGCCGCTGTCGTGCTGGGAATCTTATT |
| | CATCAACACGCTGAGATGTGTGCTGCGCAGCGGCGAGTGGCGGAGTGAGGAACAGCTT |
| | TTCAGAAGTGCTCTGTCTGTGTGTCCCCTCAATGCTAAGGTTCACTACAACATTGGCA |
| | AAAACCTGGCTGATAAAGGCAACCAGACAGCTGCCATCAGATACTACCGGGAAGCCGT |
| | AAGATTAAATCCCAAGTATGTTCATGCCATGAATAATCTTGGAAATATCTTAAAAGAA |
| | AGGAATGAGCTACAGGAAGCTGAGGAGCTGCTGTCTTTGGCTGTTCAAATACAGCCAG |
| | ACTTTGCCGCTGCGTGGATGAATCTAGGCATAGTGCAGAATAGCCTGAAACGGTTTGA |
| | AGCAGCAGAGCAAAGTTACCGGACAGCAATTAAACACAGAAGGAAATACCCAGACTGT |
| | TACTACAACCTCGGGCGTCTGTATGCAGATCTCAATCGCCACGTGGATGCCTTGAATG |
| | CGTGGAGAAATGCCACCGTGCTGAAACCAGACCACAGCCTGGCCTGGAACAACATGAT |
| | TATACTCCTCGACAATACAGGTAATTTAGCCCAAGCTGAAGCAGTTGGAAGAGAGGCA |
| | CTGGAATTAATACCTAATGATCACTCTCTCATGTTCTCGTTGGCAAACGTGCTGGGGA |
| | AATCCCAGAAATACAAGGAATCTGAAGCTTTATTCCTCAAGGCAATTAAAGCAAATCC |
| | AAATGCTGCAAGTTACCATGGTAATTTGGCTGTGCTTTATCATCGTTGGGGACATCTA |
| | GACTTGGCCAAGAAACACTATGAAATCTCCTTGCAGCTTGACCCCACGGCATCAGGAA |
| | TAAGGAGAATTACGGTCTGCTGAGAAGGAAGCTAGAACTAATGCAAAAGAAAGCTGT |

| | |
|---|---|
| ORF Start: at 1 | ORF Stop: end of sequence |

| | | |
|---|---|---|
| SEQ ID NO: 134 | 505 aa | MW at 57242.1 kD |

| | |
|---|---|
| NOV23k, | EFKFNVLEIVQKVLHKDKSLENLGMLRNGGLLFRMTLLTSGGAGMLYVRWRIMGTGPP |
| 169252492 | |
| Protein Sequence | AFTEVDNPASFADSMLVRAVNYNYYYSLNAWLLLCPWWLCFDWSMGCIPLIKSISDWR |
| | VIALAALWFCLIGLICQALCSEDGHKRRILTLGLGFLVIPFLPASNLFFRVGFVVAER |
| | VLYLPSIGYCVLLTFGFGALSKHTKKKKLIAAVVLGILFINTLRCVLRSGEWRSEEQL |
| | FRSALSVCPLNAKVHYNIGKNLADKGNQTAAIRYYREAVRLNPKYVHAMNNLGNTLKE |
| | RNELQEAEELLSLAVQIQPDFAAAWMNLGIVQNSLKRFEAAEQSYRTAIKBRRKYPDC |
| | YYNLGRLYADLNRHVDALNAWRNATVLKPEHSLAWNNMIILLDNTGNLAQAEAVGREA |
| | LELIPNDHSLMFSLANVLGKSQKYKESEALFLKAIKANPNAASYHGNLAVLYHRWGHL |
| | DLAKKHYEISLQLDPTASGTKENYGLLRRKLELMQKKAVLE |

| | |
|---|---|
| SEQ ID NO: 135 | 1515 bp |

| | |
|---|---|
| NOV23l, | GAATTCAAATTCAATGTTCTGGAAATTGTCCAGAAGGTACTACATAAGGACAAGTCAT |
| 174104491 DNA | |
| Sequence | TACAGAATCTCGGCATGCTCAGGAACGGGGACCTCCTCTTCAGAATGACCCTGCTCAC |
| | CTCTGGAGGGGCTGGGATGCTCTACGTGCGCTGGAGGATCATGGCCACGGGCCCCCCG |
| | GCCTTCACCGAGGTGGACAACCCGGCCTCCTTTGCTGACAGCATGCTGGTGAGGGCCG |
| | TAAACTACAATTACTACTATTCATTGAATGCCTGGCTGCTGCTGTGTCCCTGGTGGCT |
| | GTGTTTTGATTGGTCAATGGGCTGCATCCCCCTCATTAAGTCCATCAGCGACTGGAGG |
| | GTAATTGCACTTGCAGCACTCTGGTTCTGCCTAATTGGCCTGATATGCCAAGCCCTGT |
| | GCTCTGAAGACGGCCACAAGAGAAGGATCCTTACTCTGGGCCTGGGATTTCTCGTTAT |
| | CCCATTTCTCCCCGCGAGTAACCTGTTCTTCCGAGTGGGCTTCGTGGTCGCGGAGCGT |
| | GTCCTCTACCTCCCCAGCATTGGGTACTGTGTGCTGCTGACTTTTGGATTCGGAGCCC |
| | TGAGCAAACATACCAAGAAAAAGAAACTCATTGCCGCTGTCGTGCTGGGAATCTTATT |
| | CATCAACACGCTGAGATGTGTGCTGCGCAGCGGCGAGTGGCGGAGTGAGGAACAGCTT |
| | TTCAGAAGTCCTCTGTCTGTGTGTCCCCTCAATGCTAAGGTTCACTACAACATTGGCA |
| | AAAACCTGGCTGATAAAGGCAACCAGACAGCTGCCATCAGATACTACCGGGAAGCTGT |
| | AAGATTAAATCCCAAGTATGTTCATGCCATGAATAATCTTGGAAATATCTTAAAAGAA |
| | AGGAATGAGCTACAGGAAGCTGAGGAGCTGCTGTCTTTGGCTGTTCAAATACAGCCAG |
| | ACTTTGCCGCTGCGTGGATGAATCTAGGCATAGTGCAGAATAGCCTGAAACGGTTTGA |
| | AGCAGCAGAGCAAAGTTACCGGACAGCAATTAAACACAGAAGGAAATACCCAGACTGT |
| | TACTACAACCTCGGGCGTCTGTATGCAGATCTCAATCGCCACGTCGATGCCTTGAATG |
| | CGTGGAGAAATGCCACCGTGCTGAAACCAGACCACAGCCTGGCCTGGAACAACATGAT |
| | TATACTCCTCGACAATACAGGTAATTTAGCCCAAGCTGAAGCAGTTGGAAGAGAGGCA |
| | CTGGAATTAATACCTAATGATCACTCTCTCATGTTCTCGTTGGCAAACGTGCTGGGGA |
| | AATCCCAGAAATACAAGGAATCTGAAGCTTTATTCCTCAAGGCAATTAAAGCAAATCC |
| | AAATGCTGCAAGTTACCATGGTAATTTGGCTGTGCTTTATCATCGTTGGGGACATCTA |
| | GACTTGGCCAAGAAACACTATGAAATCTCCTTGCAGCTTGACCCCACGGCATCAGGAA |
| | CTAAGGAGAATTACGGTCTGCTGAGAAGAAAGCTAGAACTAATGCAAAAGAAAGCTGT |

| | |
|---|---|
| ORF Start: at 1 | ORF Stop: end of sequence |

| | | |
|---|---|---|
| SEQ ID NO: 136 | 505 aa | MW at 57300.1 kD |

| | |
|---|---|
| NOV23l, | EFKFNVLEIVQKVLHKDKSLENLGMLRNGDLLFRMTLLTSGGAGMLYVRWRIMGTGPP |
| 174104491 | |
| Protein Sequence | AFTEVDNPASFADSMLVRAVNYNYYYSLNAWLLLCPWWLCFDWSMGCIPLIKSISDWR |
| | VIALAALWFCLICLICQALCSEDGHKRRILTLGLGFLVIPFLPASNLFFRVGFVVAER |
| | VLYLPSIGYCVLLTFGFGALSKHTKKKKLIAAVVLGILFINTLRCVLRSGEWRSEEQL |
| | FRSALSVCPLNAKVHYNIGKNLADKGNQTAAIRYYREAVRLNPKYVHAMNNLGNILKE |
| | RNELQEAEELLSLAVQIQPDFAAAWMNLGIVQNSLKRFEAAEQSYRTAIKHRRKYPDC |
| | YYNLGRLYADLNRHVDALNAWRNATVLKPEHSLAWNNMIILLDNTGNLAQAEAVGREA |
| | LELIPNDHSLMFSLANVLGKSQKYKESEALFLKAIKANPNAASYHGNLAVLYHRWGHL |
| | DLAKKHYEISLQLDPTASGTKENYGLLRRKLELMQKKAVLE |

| | |
|---|---|
| SEQ ID NO: 137 | 855 bp |

| | |
|---|---|
| NOV23m, | GAATTCAGCGGCGAGTGGCGGAGTGAGGAACAGCTTTTCAGAAGTGCTCTGTCTGTGT |
| 169252509 DNA | |
| Sequence | GTCCCCTCAATGCTAAGGTTCACTACAACATTGGCAAAAACCTGGCTGATAAAGGCAG |
| | CCAGACAGCTGCCATCAGATACTACCGGGAAGCTGTAAGATTAAATCCCAAGTATGTT |
| | CATGCCATGAATAATCTTGGAAATATCTTAAAAGAAAGGAATGAGCTACAGGAAGCTG |
| | AGGAGCTGCTGTCTTTGGCTGTTCAAATACAGCCAGACTTTGCCGCTGCGTGGATGAA |
| | TCTAGGCATAGTGCAGAATAGCCTGAAACGGTTTGAAGCAGCAGAGCAAAGTTATCCG |
| | ACAGCAATTAAACACAGAAGGAAATACCCAGACTGTTACTACAACCTCGGGCGTCTGT |
| | ATGCAGATCTCAATCGCCACGTGGATGCCTTGAATGCGTGGAGAAATGCCACCGTGCT |
| | GAAACCAGAGCACAGCCTGGCCTGGAACAACATGATTATACTCCTCGACAATACAGGT |
| | AATTTAGCCCAAGCTGAAGCAGTTGGAAGAGAGGCACTGGAATTAATACCTAATGATC |
| | ACTCTCTCATGTTCTCGTTGGCAAACGTGCTGGGGAAATCCCAGAAATACAAGGAATC |
| | TGAAGCTTTATTCCTCAAGGCAATTAAAGCAAATCCAAATGCTGCAAGTTACCATGGT |
| | AATTTGGCTGTGCTTTATCATCGTTGGGGACATCTAGACTTGGCCAAGAAACACTATG |
| | AAATCTCCTTGCAGCTTGACCCCACGGCATCAGGAACTAAGGAGAATTACGGTCTGCT |
| | GAGAAGAAAGCTAGAACTAATGCAAAAGAAAGCTGTCCTCGAG |

| | |
|---|---|
| ORF Start: at 1 | ORF Stop: end of sequence |

| | | |
|---|---|---|
| SEQ ID NO: 138 | 285 aa | MW at 32488.7 kD |

| | |
|---|---|
| NOV23m, | EFSGEWRSEEQLFRSALSVCPLNAKVHYNIGKNLADKGSQTAAIRYYREAVRLNPKYV |
| 169252509 | |
| Protein Sequence | HAMNNLGNILKERNELQEAEELLSLAVQIQPDFAAAWMNLGIVQNSLKRFEAAEQSYR |
| | TAIKHRRKYPDCYYNLGRLYADLNRHVDALNAWRNATVLKPEHSLAWNNMIILLDNTG |
| | NLAQAEAVGREALELIPNDHSLMFSLANVLGKSQKYKESEALFLKAIKANPNAASYHG |
| | NLAVLYHRWGHLDLAKKHYEISLQLDPTASGTKENYGLLRRKLELMQKKAVLE |

| | |
|---|---|
| SEQ ID NO: 139 | 855 bp |

| | |
|---|---|
| NOV23n, | GAATTCAGCGGCGAGTGGCGGAGTGAGGAACAGCTTTTCAGAAGTGCTCTGTCTGTGT |
| 169252515 DNA | |
| Sequence | GTCCCCTCAATGCTAAGGTTCACCACAACATTGGCAAAAACCTGGCTGATAAAGGCAA |
| | CCAGACAGCTGCCATCAGATACTACCGGGAAGCTGTAAGATTAAATCCCAAGTATGTT |
| | CATGCCATGAATAATCTTGGAAATATCTTAAAAGAAAGGAATGAGCTACAGGAAGCTG |
| | AGGAGCTGCTGTCTTTGGCTGTTCAAATACAGCCAGACTTTGCCGCTGCGTGGATGAA |
| | TCTAGGCATAGTGCAGAATAGCCTGAAACGGTTTGAAGCAGCAGAGCAAAGTTACCGG |
| | ACAGCAATTAAACACAGAAGGAAATACCCAGACTGTTACTACAACCTCGGGCGTCTGT |
| | ATGCAGATCTCAATCGCCACGTGGATGCCTTGAATGCGTGGAGAAATGCCACCGTGCT |
| | GAAACCAGAGCACAGCCTGGCCTGGAACAACATGATTATACTCCTCGACAATACAGGT |
| | AATTTAGCCCAAGCTGAAGCAGTTGGAAGAGAGGCACTGGAATTAATACCTAATGATC |
| | ACTCTCTCATGTTCTCGTTGGCAAACGTGCTGGGGAAATCCCAGAAATACAAGGAATC |
| | TGAAGCTTTATTCCTCAAGGCAATTAAAGCAAATCCAAATGCTGCAAGTTACCATGGT |
| | AATTTGGCTGTGCTTTATCATCGTTGGGGACATCTAGACTTGGCCAAGAAACACTATC |
| | AAATCTCCTTGCAGCTTGACCCCACGGCATCAGGAACTAAGGAGAATTACGGTCTCCT |
| | GAGAAGAAAGCTAGAACTAATGCAAAAGAAAGCTGTCCTCGAG |

| | |
|---|---|
| ORF Start: at 1 | ORF Stop: end of sequence |

| | | |
|---|---|---|
| SEQ ID NO: 140 | 285 aa | MW at 32489.7 kD |

| | |
|---|---|
| NOV23n, | EFSGEWRSEEQLFRSALSVCPLNAKVHHNIGKNLADKGNQTAAIRYYREAVRLNPKYV |
| 169252515 | |
| Protein Sequence | HAMNNLGNILKERNELQEAEELLSLAVQIQPDFAAAWMNLCIVQNSLKRFEAAEQSYR |
| | TAIKHRRKYPDCYYNLGRLYADLNRHVDALNAWRNATVLKPEHSLAWNNMIILLDNTG |
| | NLAQAEAVGREALELIPNDHSLMFSLANVLGKSQKYKESEALFLKAIKANPNAASYHG |
| | NLAVLYHRWGHLDLAKKHYEISLQLDPTASGTKENYGLLRRKLELMQKKAVLE |

| | |
|---|---|
| SEQ ID NO: 141 | 855 bp |

| | |
|---|---|
| NOV23o, | GAATTCAGCGGCGAGTGGCGGAGTGAGGAACAGCTTTTCAGAAGTGCTCTGTCTGTGT |
| 169252519 DNA | |
| Sequence | GTCCCCTCAATGCTAAGGTTCACTACAACATTGGCAAAAACCTGGCTGATAAAGGCAA |
| | CCAGACAGCCGCCATCAGATACTACCGGCAAGCTGTAAGATTAAATCCCAAGTATGTT |
| | CATGCCATGAATAATCTTGGAAATATCTTAAAAGAAAGGAATGAGCTACAGGAAGCTG |
| | AGGACCTGCTGTCTTTGGCTGTTCAAATACAGCCAGACTTTGCCGCTGCGTGGATGAA |
| | TCTAGGCATAGTGCAGAATAGCCTGAAACGGTTTGAAGCAGCAGAGCAAAGTTACCGG |
| | ACAGCAATTAAACACAGAAGGAAATACCCAGACTGTTACTACAACCTCGGGCGTCTGT |
| | ATGCAGATCTCAATCGCCACGTGGATGCCTTGAATGCGTGGAGAAATGCCACCGTGCT |
| | GAAACCAGAGCACAGCCTGGCCTGGAACAACATGATTATACTCCTCGACAATACAGGT |
| | AATTTAGCCCAAGCTGAAGCAGTTGGAAGAGAGGCACTGGAATTAATACCTAATGATC |
| | ACTCTCTCATGTTCTCGTTGGCAAACGTGCTGGGGAAATCCCAGAAATACAAAGAATC |
| | TGAAGCTTTATTCCTCAAGGCAATTAAAGCAAATCCAAATGCTGCAAGTTACCATGGT |
| | AATTTGGCTGTGCTTTATCATCGTTGGGGACATCTAGACTTGGCCAAGAAACACTATG |
| | AAATCTCCTTGCAGCTTGACCCCACGGCATCAGGAACTAAGGAGAATTACGGTCTGCT |
| | ACAAGAAAGCTAGAACTAATGCAAAAGAAAGCTGTCCTCGAG |

| | |
|---|---|
| ORF Start: at 1 | ORF Stop: end of sequence |

| | | |
|---|---|---|
| SEQ ID NO: 142 | 285 aa | MW at 32515.7 kD |

| | |
|---|---|
| NOV23o, | EFSGEWRSEEQLFRSALSVCPLNAKVHYNIGKNLADKGNQTAAIRYYREAVRLNPKYV |
| 169252519 | |
| Protein Sequence | HAMNNLGNILKERNELQEAEELLSLAVQIQPDFAAAWMNLGIVQNSLKRFEAAEQSYR |
| | TAIKHRRKYPDCYYNLGRLYADLNRHVDALNAWRNATVLKPEHSLAWNNMIILLDNTG |
| | NLAQAEAVGREALELIPNDHSLMFSLANVLGKSQKYKESEALFLKAIKANPNAASYHG |
| | NLAVLYHRWGHLDLAKKHYEISLQLDPTASGTKENYGLLRRKLELMQKKAVLE |

| | |
|---|---|
| SEQ ID NO: 143 | 855 bp |

| | |
|---|---|
| NOV23p, | GAATTCAGCGGCGAGTGGCGGAGTGAGGAACAGCTTTTCAGAAGTGCTCTGTCTGTGT |
| 169252524 DNA | |
| Sequence | GTCCCCTCAATGCTAAGGTTCACTACAACATTGGCAAAAACCTGGCTGATAAAGGCAA |
| | CCAGACAGCTGCCATCAGATACTACCGGGAAGCTGTAAGATTAAATCCCAAGTATGTT |
| | CATGCCATGAATAATCTTGGAAATATCTTAAAAGAAAGGAATGAGCTACAGGAAGTTG |
| | AGGAGCTGCTGTCTTTGGCTGTTCAAATACAGCCAGACTTTGCCGCTGCGTGGATGAA |
| | TCTAGGCATAGTGCAGAATAGCCTGAAACGCTTTGAAGCAGCAGAGCAAAGTTACCGG |
| | ACAGCAATTAAACACAGAAGGAAATACCCAGACTGTTACTACAACCTCGGCCGTCTGT |
| | ATGCAGATCTCAATCGCCACGTGCATGCCTTGAATGCGTGGAGAAATGCCACCGTGCT |
| | GAAACCAGAGCACAGCCTGGCCTGGAACAACATGATTATACTCCTCCACAATACAGGT |
| | AATTTAGCCCAAGCTGAAGCAGTTGGAAGAGAGGCACTGGAATTAATACCTAATGATC |
| | ACTCTCTCATGTTCTCGTTGGCAAACGTGCTGGGGAAATCCCAGAAATACAAGGAATC |
| | TGAAGCTTTATTCCTCAAGGCAATTAAAGCAAATCCAAATCCTGCAAGTTACCATGGT |
| | AATTTGGCTGTGCTTTATCATCGTTGGGGACATCTAGACTTGGCCAAGAAACACTATG |
| | AAATCTCCTTGCAGCTTGACCCCACGGCATCAGGAACTAACGAGAATTACGGTCTGCT |
| | GAGAAGAAAGCTAGAACTAATGCAAAAGAAAGCTGTCCTCGAG |

| | |
|---|---|
| ORF Start: at 1 | ORF Stop: end of sequence |

| | | |
|---|---|---|
| SEQ ID NO: 144 | 285 aa | MW at 32543.8 kD |

| | |
|---|---|
| NOV23p, | EFSGEWRSEEQLFRSALSVCPLNAKVIIYNIGKNLADKCNQTAAIRYYREAVRLNPKYV |
| 169252524 | |
| Protein Sequence | HAMNNLGNILKERNELQEVEELLSLAVQIQPDFAAAWMNLGIVQNSLKRFEAAEQSYR |
| | TAIKHRRKYPDCYYNLGRLYADLNRHVDALNAWRNATVLKPEHSLAWNNMIILLDNTG |
| | NLAQAEAVGREALELIPNDHSLMFSLANVLGKSQKYKESEALFLKAIKANPNAASYHG |
| | NLAVLYHRWGHLDLAKKHYEISLQLDPTASGTKENYGLLRRKLELMQKKAVLE |

| | |
|---|---|
| SEQ ID NO: 145 | 855 bp |

| | |
|---|---|
| NOV23q, | GAATTCAGCGGCGAGTGGCGGAGTGAGGAACAGCTTTTCAGAAGTCCTCTGTCTGTGT |
| 169252528 DNA | |
| Sequence | GTCCCCTCAATGCTAAGGTTCACTACAACATTGGCAAAAACCTGGCTGATAAAGGCAA |
| | CCAGACAGCTGCCATCAGATACTACCGGGAAGCTGTAAGATTAAATCCCAAGTATGTT |
| | CATGCCATGAATAATCTTGGAAATATCTTAAAAGAAAGGAATGAGCTACAGGAAGCTG |
| | AGGAGCTGCTGTCTTTGGCTGTTCAAATACAGCCAGACTTTGCCGCTGCGTGGATGAA |
| | TCTAGGCATAGTGCAGAATAGCCTGAAACGGTTTGAAGCAGCAGAGCAAAGTTACCGG |
| | ACAGCAATTAAACACAGAAGGAAATACCCAGACTGTTACTACAACCTCGGGCGTCTGT |
| | ATGCAGATCTCAATCGCCACGTGGATGCCTTGAATGCGTGGAGAAATGCCACCGTGCT |
| | GAAACCAGAGCACAGCCTGGCCTGGAACAACATGATTATACTCCTCGACAATACAGGT |
| | AATTTAGCCCAAGCTGAAGCAGTTGGAAGAGAGGCACTGGAATTAATACCTAATGATC |
| | ACTCTCTCATGTTCTCGTTGGCAAACGTGCTGGGGAAATCCCAGAAATACAAGGAATC |
| | TGAAGCTTTATCCCTCAAGGCAATTAAAGCAAATCCAAATGCTGCAAGTTACCATGGT |
| | AATTTGGCTGTGCTTTATCATCGTTGGGGACATCTAGACTTGGCCAAGAAACACTATG |
| | AAATCTCCTTGCAGCTTGACCCCACGGCATCAGGAACTAAGGAGAATTACGGTCTGCT |
| | AGAAGAAAGCTAGAACTAATGCAAAAGAAAGCTGTCCTCGAG |

| | |
|---|---|
| ORF Start: at 1 | ORF Stop: end of sequence |

| | | |
|---|---|---|
| SEQ ID NO: 146 | 285 aa | MW at 32455.6 kD |

| | |
|---|---|
| NOV23q, | EFSGEWRSEEQLFRSALSVCPLNAKVHYNIGKNLADKGNQTAAIRYYREAVRLNPKYV |
| 169252528 | |
| Protein Sequence | HAMNNLGNILKERNELQEAEELLSLAVQIQPDFAAAWMNLGIVQNSLKRFEAAEQSYR |
| | TAIKHRRKYPDCYYNLGRLYADLNRHVDALNAWRNATVLKPEHSLAWNNMIILLDNTG |
| | NLAQAEAVGREALELIPNDHSLMFSLANVLGKSQKYKESEALSLKAIKANPNAASYHG |
| | NLAVLYHRWGHLDLAKKHYEISLQLDPTASGTKENYGLLRRKLELMQKKAVLE |

| | |
|---|---|
| SEQ ID NO: 147 | 855 bp |

| | |
|---|---|
| NOV23r, | GAATTCAGCGGCGAGTGGCGGAGTGAGGAACAGCTTTTCAGAAGTGCTCTGTCTGTGT |
| 169252547 DNA | |
| Sequence | GTCCCCTCAATGCTAAGGTTCACTACAACATTGGCAAAAACCTGGCTGATAAAGGCAA |
| | CCAGACAGCTGCCATCAGATACTACCGGGAAGCTGTAAGATTAAATCCCAAGTATGTT |
| | CATGCCATGAATAATCTTGGAAATATCTTAAAAGAAAGGAATGAGCTACAGGAAGCTG |
| | AGGAGCTGCTGTCTTTGGCTGTTCAAATACACCCAGACTTTGCCGCTGCGTGGATGAA |
| | TCTAGGCATAGTGCAGAATAGCCTGAAACGGTTTGAAGCAGCAGAGCAAAGTTACCGG |
| | ACAGCAATTAAACACAGAAGGAAATACCCAGACTGTTACTACAACCTCGGGCGTCTGT |
| | ATGCAGATCTCAATCGCCACGTGGATGCCTTGAATGCGTGGAGAAATGCCACCGTGCT |
| | GAAACCAGAGCACAGCCTGGCCTGGAACAACATGATTATACTCCTCGACAATACAGGT |
| | AATTTAGCCCAAGCTGAACCAGTTGGAAGAGAGGCACTGCAATTAATACCTAATGATC |
| | ACTCTCTCATGTTCTCGTTGGCAAACGTGCTGGGGAAATCCCAGAAATACAAGGAATC |
| | TGAAGCTTTATTCCTCAAGGCAATTAAAGCAAATCCAAATGCTGCAAGTTACCATGGT |
| | AATTTGGCTGTGCTTTATCATCGTTGGGGACATCTAGACTTGGCCAAGAAACACCATG |
| | AAATCTCCTTGCAGCTTGACCCCACGGCATCACGAACTAAGGAGAATTACGGTCTGCT |
| | GAGAAGAAAGCTAGAACTAATGCAAAACAAAGCTGTCCTCGAG |

| | |
|---|---|
| ORF Start: at 1 | ORF Stop: end of sequence |

| | | |
|---|---|---|
| SEQ ID NO: 148 | 285 aa | MW at 32489.7 kD |

| | |
|---|---|
| NOV23r, | EFSGEWRSEEQLFRSALSVCPLNAKVHYNIGKNLADKGNQTAAIRYYREAVRLNPKYV |
| 169252547 | |
| Protein Sequence | HAMNNLGNILKERNELQEAEELLSLAVQIQPDFAAAWMNLGIVQNSLKRFEAAEQSYR |
| | TAIKHRRKYPDCYYNLGRLYADLNRHVDALNAWRNATVLKPEHSLAWNNMIILLDNTG |
| | NLAQAEAVGREALELIPNDHSLMFSLANVLGKSQKYKESEALFLKAIKANPNAASYHG |
| | NLAVLYHRWGHLDLAKKHHEISLQLDPTASGTKENYGLLRRKLELMQKKAVLE |

| | |
|---|---|
| SEQ ID NO: 149 | 855 bp |

| | |
|---|---|
| NOV23s, | GAATTCAGCGGCGAGTGGCGGAGTGAGGAACAGCTTTTCAGAAGTGCTCTGTCTGTGT |
| 169252557 DNA | |
| Sequence | GTCCCCTCAATGCTAAGGTTCACTACAACATTGGCAAAAACCTGGCTGATAAAGGCAA |
| | CCAGACAGCTGCCATCAGATACTACCGGGAAGCTGTAAGATTAAATCCCAAGTATGTT |
| | CATGCCATGAATAATCTTGGAAATATCTTAAAAGAAAGGAATGAGCTACAGGAAGCTG |
| | AGGAGCTGCTGTCTTTCGCTGTTCAAATACAGCCAGACTTTGCCGCTGCGTGGATGAA |
| | TCTAGGCATAGTGCAGAATAGCCTGAAACGGTTTGAAGCAGCAGAGCAAAGTTACCGG |
| | ACAGCAATTAAACACAGAAGGAAATACCCAGACTGTTACTACAACCTCGGGCGTCTGT |
| | ATGCAGATCTCAATCGCCACGTGGATGCCTTGAATGCGTGGAGAAATGCCACCGTGCT |
| | GAAACCAGAGCACAGCCTGGCCTGGAACAACATGATTATACTCCTCGACAATACAGGT |
| | AATTTAGCCCAAGCTGAAGCAGTTGGAAGAGAGGCACTGGAATTAATACCTAATGATC |
| | ACTCTCTCATGTTCTCGTTGGCAAACGTGCTGGGGAAATCCCAGAAATACAGGGAATC |
| | TGAAGCTTTATTCCTCAAGGCAATTAAAGCAAATCCAAATGCTGCAAGTTACCATGGT |
| | AATTTGGCTGTGCTTTATCATCGTTGGGGACATCTAGACTTGGCCAAGAAACACTATG |
| | AAATCTCCTTGCAGCTTCACCCCACGGCATCAGGAACTAAGGACAATTACGGTCTGCT |
| | GAGAAGAAAGCTAGAACTAATGCAAAAGAAAGCTGTCCTCGAG |

| | |
|---|---|
| ORF Start: at 1 | ORF Stop: end of sequence |

| | | |
|---|---|---|
| SEQ ID NO: 150 | 285 aa | MW at 32543.7 kD |

| | |
|---|---|
| NOV23s, | EFSGEWRSEEQLFRSALSVCPLNAKVHYNIGKNLADKGNQTAAIRYYREAVRLNPKYV |
| 169252557 | |
| Protein Sequence | HANNNLGNILKERNELQEAEELLSLAVQIQPDFAAAWMNLGIVQNSLKRFEAAEQSYR |
| | TAIKHRRKYPDCYYNLGRLYADLNRHVDALNAWRNATVLKPEHSLAWNNMIILLDNTG |
| | NLAVLYHRWGHLDLAKKHYEISLQLDPTASGTKENYGLLRRKLELMQKKAVLE |

| | |
|---|---|
| SEQ ID NO: 151 | 1515 bp |

| | |
|---|---|
| NOV23t, | GAATTCAAATTCAATGTTCTGGAAATTGTCCAGAAGGTACTACATAAGGACAAGTCAT |
| 174104491 DNA | |
| Sequence | TAGAGAATCTCGGCATGCTCAGGAACGGGGACCTCCTCTTCAGAATGACCCTGCTCAC |
| | CTCTGGAGGGGCTCGGATGCTCTACGTGCGCTGGAGGATCATGGGCACGGGCCCGCCG |
| | GCCTTCACCGAGGTGGACAACCCGGCCTCCTTTGCTGACAGCATGCTGGTGAGGGCCG |
| | TAAACTACAATTACTACTATTCATTGAATGCCTGGCTGCTGCTGTGTCCCTGGTGGCT |
| | GTGTTTTGATTGGTCAATGGGCTGCATCCCCCTCATTAAGTCCATCAGCGACTGGAGG |
| | GTAATTGCACTTGCAGCACTCTGGTTCTGCCTAATTGGCCTGATATGCCAAGCCCTGT |
| | GCTCTGAAGACGGCCACAAGAGAACGATCCTTACTCTGGGCCTGGGATTTCTCGTTAT |
| | CCCATTTCTCCCCGCGAGTAACCTGTTCTTCCGAGTGGGCTTCGTGGTCGCGGAGCGT |
| | GTCCTCTACCTCCCCAGCATTCGGTACTGTGTGCTGCTGACTTTTGGATTCGGAGCCC |
| | TGAGCAAACATACCAAGAAAAAGAAACTCATTGCCGCTGTCGTGCTGGGAATCTTATT |
| | CATCAACACGCTGAGATGTGTGCTGCGCAGCGGCGAGTGGCGGAGTGAGGAACAGCTT |
| | TTCAGAAGTGCTCTGTCTGTGTGTCCCCTCAATGCTAAGGTTCACTACAACATTGGCA |
| | AAAACCTGGCTGATAAAGGCAACCAGACAGCTGCCATCAGATACTACCGGGAAGCTGT |
| | AAGATTAAATCCCAAGTATGTTCATGCCATGAATAATCTTGGAAATATCTTAAAAGAA |
| | AGGAATGAGCTACAGGAAGCTGAGGAGCTGGCTGTCTTTGGCTGTTCAAATACAGCCAG |
| | ACTTTGCCCCTGCGTGGATGAATCTAGGCATAGTGCAGAATAGCCTGAAACGGTTTGA |
| | AGCAGCAGAGCAAAGTTACCGGACAGCAATTAAACACAGAACGAAATACCCAGACTGT |
| | TACTACAACCTCGGGCGTCTGTATGCAGATCTCAATCGCCACGTGGATGCCTTGAATG |
| | CGTGGAGAAATGCCACCGTGCTGAAACCAGAGCACAGCCTGGCCTGGAACAACATGAT |
| | TATACTCCTCGACAATACAGGTAATTTAGCCCAAGCTGAAGCAGTTGGAAGAGACGCA |
| | CTGGAATTAATACCTAATGATCACTCTCTCATGTTCTCGTTGGCAAACGTCCTGGGGA |
| | AATCCCAGAAATACAAGGAATCTGAAGCTTTATTCCTCAAGGCAATTAAAGCAAATCC |
| | AAATGCTGCAAGTTACCATGGTAATTTGGCTGTGCTTTATCATCGTTGGGGACATCTA |
| | GACTTGGCCAAGAAACACTATGAAATCTCCTTGCAGCTTGACCCCACCGCATCAGGAA |
| | CTAAGGAGAATTACGGTCTGCTGAGAAGAAAGCTAGAACTAATGCAAAAGAAAGCTGT |

| | |
|---|---|
| ORF Start: at 1 | ORF Stop: end of sequence |

| | | |
|---|---|---|
| SEQ ID NO: 152 | 505 aa | MW at 57300.1 kD |

| | |
|---|---|
| NOV23t, | EFKFNVLEIVQKVLHKDKSLENLGMLRNGDLLFRMTLLTSGGAGMLYVRWRIMGTGPP |
| 174104491 | |
| Protein Sequence | AFTEVDNPASFADSMLVRAVNYNYYYSLNAWLLLCPWWLCFDWSMGCIPLIKSISDWR |
| | VIALAALWFCLIGLICQALCSEDGHKRRILTLGLGFLVIPFLPASNLFFRVGFVVAER |
| | VLYLPSIGYCVLLTFGFGALSKHTKKKKLIAAVVLGILFINTLRCVLRSGEWRSEEQL |
| | FRSALSVCPLNAKVHYNIGKNLADKGNQTAAIRYYREAVRLNPKYVHANNNLGNILKE |
| | RNELQEAEELLSLAVQIQPDFAAAWMNLGIVQNSLKRFEAAEQSYRTAIKHRRKYPDC |
| | YYNLGRLYADLNRHVDALNAWRNATVLKPEHSLAWNNMIILLDNTGNLAQAEAVGREA |
| | LELIPNDHSLMFSLANVLGKSQKYKESEALFLKAIKANPNAASYHGNLAVLYHRWGHL |
| | DLAKKHYEISLQLDPTASGTKENYGLLRRKLELMQKKAVLE |

| | |
|---|---|
| SEQ ID NO: 153 | 843 bp |

| | |
|---|---|
| NOV23u, | AGCGGCGAGTGGCGGAGTGAGGAACAGCTTTTCAGAAGTGCTCTGTCTGTGTGTCCCC |
| CG57774-02 DNA | |
| Sequence | TCAATGCTAAGGTTCACTACAACATTGGCAAAAACCTGGCTGATAAAGGCAACCAGAC |
| | AGCTGCCATCAGATACTACCGGGAAGCTGTAAGATTAAATCCCAAGTATGTTCATGCC |
| | ATGAATAATCTTGGAAATATCTTAAAAGAAAGGAATGAGCTACAGGAAGCTGAGGAGC |
| | TGCTGTCTTTGGCTGTTCAAATACAGCCAGACTTTGCCGCTGCGTGGATCAATCTAGG |
| | CATAGTGCAGAATAGCCTGAAACGGTTTGAAGCAGCAGAGCAAAGTTACCGGACAGCA |
| | ATTAAACACACAAGGAAATACCCAGACTGTTACTACAACCTCGGGCGTCTGTATGCAG |
| | ATCTCAATCGCCACGTGGATGCCTTCAATGCGTGGAGAAATGCCACCGTGCTGAAACC |
| | AGAGCACAGCCTGGCCTGGAACAACATGATTATACTCCTCCACAATACAGGTAATTTA |
| | GCCCAAGCTGAAGCAGTTGGAAGAGAGGCACTGGAATTAATACCTAATGATCACTCTC |
| | TCATGTTCTCGTTGGCAAACGTGCTGGGGAAATCCCAGAAATACAAGGAATCTGAAGC |
| | TTTATTCCTCAAGGCAATTAAAGCAAATCCAAATGCTGCAAGTTACCATGGTAATTTG |
| | GCTGTGCTTTATCATCGTTGGGGACATCTAGACTTGGCCAAGAAACACTATGAAATCT |
| | CCTTGCAGCTTGACCCCACGGCATCAGGAACTAAGGAGAATTACGGTCTGCTGAGAAG |
| | AAAGCTAGAACTAATGCAAAAGAAAGCTGTC |

| | |
|---|---|
| ORF Start: at 1 | ORF Stop: end of sequence |

| | | |
|---|---|---|
| SEQ ID NO: 154 | 281 aa | MW at 31997.2 kD |

| | |
|---|---|
| NOV23u, | SGEWRSEEQLFRSALSVCPLNAKVHYNIGKNLADKGNQTAAIRYYREAVRLNPKYVHA |
| CG57774-02 | |
| Protein Sequence | MNNLGNILKERNELQEAEELLSLAVQIQPDFAAAWMNLGIVQNSLKRFEAAEQSYRTA |
| | IKHRRKYPDCYYNLGRLYADLNRHVDALNAWRNATVLKPEHSLAWNNMIILLDNTGNL |
| | AQAEAVGREALELIPNDHSLMFSLANVLGKSQKYKESEALFLKAIKANPNAASYHGNL |
| | AVLYHRWGHLDLAKKHYEISLQLDPTASGTKENYGLLRRKLELMQKKAV |

| | |
|---|---|
| SEQ ID NO: 155 | 1503 bp |

| | |
|---|---|
| NOV23v, | AAATTCAATGTTCTGGAAATTGTCCAGAAGGTACTACATAAGGACAAGTCATTAGAGA |
| CG57774-03 DNA | |
| Sequence | ATCTCGGCATGCTCAGGAACGGGGGCCTCCTCTTCAGAATGACCCTGCTCACCTCTGG |
| | AGGGGCTGGGATGCTCTACGTGCGCTGGAGGATCATGGGCACGGGCCCGCCGGCCTTC |
| | ACCGAGGTGGACAACCCGGCCTCCTTTGCTGACAGCATGCTGGTGAGGGCCGTAAACT |
| | ACAATTACTACTATTCATTGAATGCCTGGCTGCTGCTGTGTCCCTGGTGGCTGTGTTT |
| | TGATTGGTCAATGGGCTGCATCCCCCTCATTAAGTCCATCAGCGACTGGAGGGTAATT |
| | GCACTTGCAGCACTCTGGTTCTGCCTAATTGGCCTGATATGCCAAGCCCTCTGCTCTG |
| | AAGACGGCCACAAGAGAAGGATCCTTACTCTGGGCCTGGGATTTCTCGTTATCCCATT |
| | TCTCCCTCCGAGTAACCTGTTCTTCCGAGTGGGCTTCGTGGTCGCGGAGCGTGTCCTC |
| | TACCTCCCCAGCGTTGGGTACTGTGTGCTGCTGACTTTTGGATTCGGAGCCCTGAGCA |
| | AACATACCAAGAAAAAGAAACTCATTGCCGCTGTCGTCCTGGGAATCTTATTCATCAA |
| | CACGCTGAGATGTGTGCTGCGCAGCGGCGAGTGGCGGAGTGAGGAACAGCTTTTCAGA |
| | AGTGCTCTGTCTGTGTGTCCCCTCAATGCTAAGGTTCACTACAACATTGGCAAAAACC |
| | TGGCTGATAAAGGCAACCACACACCTGCCATCAGATACTACCGGGAAGCTGTAAGATT |
| | AAATCCCAAGTATGTTCATCCCATGAATAATCTTGGAAATATCTTAAAAGAAAGGAAT |
| | GAGCTACAGGAAGCTGAGGAGCTGCTGTCTTTGGCTGTTCAAATACAGCCAGACTTTG |
| | CCGCTGCGTGGATCAATCTAGGCATAGTGCAGAATAGCCTGAAACCGTTTGAAGCAGC |
| | AGAGCAAAGTTACCCGACAGCAATTAAACACAGAAGGAAATACCCAGACTGTTACTAC |
| | AACCTCGGGCGTCTGTATGCAGATCTCAATCGCCACGTGGATGCCTTGAATGCGTGGA |
| | GAAATGCCACCGTCCTGAAACCAGAGCACAGCCTGGCCTGGAACAACATGATTATACT |
| | CCTCGACAATACAGGTAATTTAGCCCAAGCTGAAGCAGTTCGAAGAGAGGCACTGGAA |
| | TTAATACCTAATGATCACTCTCTCATGTTCTCGTTGGCAAACGTGCTGGGGAAATCCC |
| | AGAAATACAAGGAATCTGAAGCTTTATTCCTCAAGGCAATTAAAGCAAATCCAAATGC |
| | TGCAAGTTACCATGGTAATTTGGCTGTGCTTTATCATCGTTGGGGACATCTAGACTTG |
| | GCCAAGAAACACTATGAAATCTCCTTGCAGCTTGACCCCACGGCATCAGGAACTAAGG |
| | AGAATTACGGTCTGCTGAGAAGAAAGCTAGAACTAATGCAAAAGAAAGCTGTC |

| | |
|---|---|
| ORF Start: at 1 | ORF Stop: end of sequence |

| | | |
|---|---|---|
| SEQ ID NO: 156 | 501 aa | MW at 56709.5 kD |

| | |
|---|---|
| NOV23v, | KFNVLEIVQKVLHKDKSLENLGMLRNGGLLFRMTLLTSGGAGMLYVRWRIMGTGPPAF |
| CG57774-03 | |
| Protein Sequence | TEVDNPASFADSMLVRAVNYNYYYSLNAWLLLCPWWLCFDWSMGCIPLIKSISDWRVI |
| | ALAALWFCLIGLICQALCSEDGHKRRILTLGLGFLVIPFLPASNLFFRVCFVVAERVL |
| | YLPSVGYCVLLTFGFGALSKHTKKKKLIAAVVLGILFINTLRCVLRSGEWRSEEQLFR |
| | SALSVCPLNAKVHYNIGKNLADKGNQTAAIRYYREAVRLNPKYVHANNNLGNILKERN |
| | ELQEAEELLSLAVQIQPDFAAAWMNLGIVQNSLKRFEAAEQSYRTAIKHRRKYPDCYY |
| | NLGRLYADLNRHVDALNAWRNATVLKPEHSLAWNNMIILLDNTGNLAQAEAVGREALE |
| | LIPNDHSLMFSLANVLGKSQKYKESEALFLKAIKANPNAASYHGNLAVLYHRWGHLDL |
| | AKKHYEISLQLDPTASGTKENYGLLRRKLELMQKKAV |

| | |
|---|---|
| SEQ ID NO: 157 | 1515 bp |

| | |
|---|---|
| NOV23w, | GAATTCAAATTCAATGTTCTGGAAATTCTCCAGAAGGTACTACATAAGGACAAGTCAT |
| CG57774-04 DNA | |
| Sequence | TAGAGAATCTCGGCATGCTCAGGAACGGGGGCCTCCTCTTCAGAATGACCCTGCTCAC |
| | CTCTCGAGGGGCTGGGATGCTCTACGTGCGCTGGAGGATCATGGGCACGGGCCCGCCG |
| | GCCTTCACCGAGGTGGACAACCCGGCCTCCTTTGCTGACAGCATGCTGGTGAGGGCCG |
| | TAAACTACAATTACTACTATTCATTGAATGCCTGGCTGCTGCTGTGTCCCTGGTGGCT |
| | GTGTTTTGATTGGTCAATGGGCTGCATCCCCCTCATTAAGTCCATCAGCGACTGGAGG |
| | GTAATTGCACTTGCAGCACTCTGGTTCTGCCTAATTGGCCTGATATGCCAAGCCCTGT |
| | GCTCTGAAGACGGCCACAAGAGAAGGATCCTTACTCTGGGCCTGGGATTTCTCGTTAT |
| | CCCATTTCTCCCTGCGAGTAACCTGTTCTTCCGAGTGGGCTTCGTGGTCGCGGAGCGT |
| | GTCCTCTACCTCCCCAGCGTTGGGTACTGTGTGCTGCTGACTTTTGGATTCGGAGCCC |
| | TGAGCAAACATACCAAGAAAAAGAAACTCATTGCCGCTGTCGTGCTGGGAATCTTATT |
| | CATCAACACGCTGAGATGTGTGCTGCGCAGCGGCGAGTGGCGGAGTGAGGAACAGCTT |
| | TTCAGAAGTGCTCTGTCTGTGTGTCCCCTCAATGCTAAGGTTCACTACAACATTGGCA |
| | AAAACCTGGCTGATAAAGGCAACCAGACACCTGCCATCAGATACTACCGGGAAGCTGT |
| | AAGATTAAATCCCAAGTATGTTCATGCCATGAATAATCTTGGAAATATCTTAAAAGAA |
| | AGGAATGAGCTACAGCAAGCTGAGGAGCTGCTGTCTTTGGCTGTTCAAATACAGCCAG |
| | ACTTTGCCGCTCCGTGGATGAATCTAGGCATAGTGCAGAATAGCCTGAAACGGTTTGA |
| | AGCAGCAGAGCAAAGTTACCGGACAGCAATTAAACACAGAAGGAAATACCCAGACTGT |
| | TACTACAACCTCGGGCGTCTGTATGCAGATCTCAATCGCCACGTGGATGCCTTGAATG |
| | CGTGGAGAAATGCCACCGTGCTGAAACCAGAGCACAGCCTGGCCTGGAACAACATGAT |
| | TATACTCCTCGACAATACAGGTAATTTAGCCCAAGCTGAAGCAGTTGGAAGAGAGGCA |
| | CTGGAATTAATACCTAATGATCACTCTCTCATGTTCTCGTTGGCAAACGTGCTGGGGA |
| | AATCCCAGAAATACAAGGAATCTGAAGCTTTATTCCTCAAGGCAATTAAAGCAAATCC |
| | AAATGCTGCAAGTTACCATGGTAATTTGGCTGTGCTTTATCATCGTTGGGGACATCTA |
| | GACTTGGCCAAGAAACACTATGAAATCTCCTTGCAGCTTGACCCCACGGCATCAGGAA |
| | CTAAGGAGAATTACGGTCTGCTGAGAAGAAAGCTAGAACTAATGCAAAAGAAAGCTGT |
| | CCTCGAG |

| | |
|---|---|
| ORF Start: at 7 | ORF Stop: at 1510 |

| | | |
|---|---|---|
| SEQ ID NO: 158 | 501 aa | MW at 56709.5 kD |

| | |
|---|---|
| NOV23w, | KFNVLEIVQKVLHKDKSLENLGMLRNGGLLFRMTLLTSGGAGMLYVRWRIMGTGPPAF |
| CG57774-04 | |
| Protein Sequence | TEVDNPASFADSMLVRAVNYNYYYSLNAWLLLCPWWLCFDWSMGCIPLIKSISDWRVI |
| | ALAALWFCLIGLICQALCSEDGHKRRILTLGLGFLVIPFLPASNLFFRVGFVVAERVL |
| | YLPSVGYCVLLTFGFGALSKHTKKKKLIAAVVLGILFINTLRCVLRSGEWRSEEQLFR |
| | SALSVCPLNAKVHYNIGKNLADKGNQTAAIRYYREAVRLNPKYVHAMNNLGNILKERN |
| | ELQEAEELLSLAVQIQPDFAAAWMNLGIVQNSLKRFEAAEQSYRTAIKHRRKYPDCYY |
| | NLGRLYADLNPHVDALNAWRNATVLKPEHSLAWNNMIILLDNTGNLAQAEAVGREAIE |
| | LIPNDHSLMFSLANVLGKSQKYKESEALFLKAIKANPNAASYHCNLAVLYHRWGHLDL |
| | AKKHYEISLQLDPTASGTKENYGLLRRKLELMQKKAV |

| | |
|---|---|
| SEQ ID NO: 159 | 1515 bp |

| | |
|---|---|
| NOV23x, | GAATTCAAATTCAATGTTCTGGAAATTGTCCAGAAGGTACTACATAAGGACAAGTCAT |
| CG57774-05 DNA | |
| Sequence | TAGAGAATCTCGGCATGCTCAGGAACGGGGGCCTCCTCTTCAGAATGACCCTGCTCAC |
| | CTCTGGAGGGGCTCGGATGCTCTACGTGCGCTGGAGGATCATGGGCACGGGCCCGCCG |
| | GCCTTCACCGAGGTGGACAACCCGGCCTCCTTTGCTGACAGCATGCTGGTGAGGGCCG |
| | TAAACTACAATTACTACTATTCATTGAATGCCTGGCTGCTGCTGTGTCCCTGGTGGCT |
| | GTGTTTTCATTGGTCAATGGGCTGCACCCCCCTCATTAAGTCCATCAGCGACTGGAGG |
| | GTAATTGCACTTGCAGCACTCTGGTTCTGCCTAATTGGCCTGATATGCCAAGCCCTGT |
| | GCTCTGAAGACGGCCACAAGAGAAGGATCCTTACTCTGGGCCTGGGATTTCTCGTTAT |
| | CCCATTTCTCCCTGCGAGTAACCTGTTCTTCCGAGTGGGCTTCGTGGTCGCGGAGCGT |
| | GTCCTCTACCTCCCCAGCGTTGGGTACTGTGTGCTGCTGACTTTTCGATTCGGAGCCC |
| | TGAGCAAACATACCAAGAAAAAGAAACTCATTGCCGCTGTCGTGCTGGGAATCTTATT |
| | CATCAACACGCTGAGATGTGTGCTGCGCAGCGGCGAGTGGCGGAGTGAGGAACAGCTT |
| | TTCAGAAGTGCTCTGTCTGTGTGTCCCCTCAATGCTAAGGTTCACTACAACATTGGCA |
| | AAAACCTGGCTGATAAAGGCAACCAGACAGCTGCCATCAGATACTACCGGGAAGCTGT |
| | AAGATTAAATCCCAAGTATGTTCATGCCATGAATAATCTTGGAAATATCTTAAAAGAA |
| | AGGAATGAGCTACAGGAAGCTGAGGAGCTGCTGTCTTTGGCTGTTCAAATACAGCCAG |
| | ACTTTGCCGCTGCGTGGATGAATCTAGGCATAGTGCAGAATAGCCTGAAACGGTTTGA |
| | AGCAGCAGAGCAAAGTTACCGGACAGCAATTAAACACAGAAGGAAATACCCAGACTGT |
| | TACTACAACCTCGGGCGTCTGTATGCAGATCTCAATCGCCACGTGGATGCCTTGAATG |
| | CGTGGAGAAATGCCACCGTCCTGAAACCAGAGCACAGCCTGGCCTGGAACAACATGAT |
| | TATACTCCTCGACAATACAGGTAATTTAGCCCAAGCTGAAGCAGTTGGAAGAGAGGCA |
| | CTGGAATTAATACCTAATGATCACTCTCTCATGTTCTCGTTGGCAAACGTGCTGGGGA |
| | AATCCCAGAAATACAAGGAATCTGAAGCTTTATTCCTCAAGGCAATTAAAGCAAATCC |
| | AAATGCTGCAAGTTACCATGGTAATTTGGCTGTGCTTTATCATCGTTGGGGGCATCTA |
| | GACTTGGCCAAGAAACACTATGAAATCTCCTTGCAGCTTGACCCCACGGCATCAGGAA |
| | CTAAGGAGAATTACGGTCTGCTGAGAAGAAAGCTAGAACTAATGCAAAAGAAAGCTGT |
| | CCTCGAG |

| | |
|---|---|
| ORF Start: at 7 | ORF Stop: at 1510 |

| | | |
|---|---|---|
| SEQ ID NO: 160 | 501 aa | MW at 56697.5 kD |

| | |
|---|---|
| NOV23x, | KFNVLEIVQKVLHKDKSLENLGMLRNGGLLFRMTLLTSGGAGMLYVRWRIMGTGPPAF |
| CG57774-05 | |
| Protein Sequence | TEVDNPASFADSMLVRAVNYNYYYSLNAWLLLCPWWLCFDWSMGCTPLIKSISDWRVI |
| | ALAALWFCLIGLICQALCSEDGHKRRILTLGLGFLVIPFLPASNLFFRVGFVVAERVL |
| | YLPSVGYCVLLTFGFGALSKHTKKKKLIAAVVLGILFINTLRCVLRSGEWRSEEQLFR |
| | SALSVCPLNAKVhYNIGKNLADKGNQTAAIRYYREAVRLNPKYVHAMNNLGNILKERN |
| | ELQEAEELLSLAVQIQPDFAAAWMNLGIVQNSLKRFEAAEQSYRTAIKHRRKYPDCYY |
| | NLGRLYADLNRHVDALNAWRNATVLKPEHSLAWNNMIILLDNTGNLAQAEAVGREALE |
| | LIPNDHSLMFSLANVLGKSQKYKESEALFLKAIKANPNAASYHGNLAVLYHRWGHLDL |
| | AKKHYEISLQLDPTASGTKENYGLLRRKLELMQKKAV |

| | |
|---|---|
| SEQ ID NO: 161 | 855 bp |

| | |
|---|---|
| NOV23y, | GAATTCAGCGGCGAGTGGCGGAGTGAGGAACAGCTTTTCAGAAGTGCTCTGTCTGTGT |
| CG57774-06 DNA | |
| Sequence | GTCCCCTCAATGCTAAGGTTCACTACAACATTGGCAAAAACCTGGCTGATAAAGGCAA |
| | CCAGACAGCTGCCATCAGATACTACCGGGAAGCTGTAAGATTAAATCCCAAGTATGTT |
| | CATGCCATGAATAATCTTGGAAATATCTTAAAAGAAAGGAATGAGCTACAGGAAGCTG |
| | AGGAGCTGCTGTCTTTGGCTGTTCAAATACAGCCAGACTTTGCCGCTGCGTGGATGAA |
| | TCTAGGCATAGTGCAGAATAGCCTGAAACGGTTTGAAGCAGCAGAGCAAAGTTACCGG |
| | ACAGCAATTAAACACAGAAGGAAATACCCAGACTGTTACTACAACCTCGGGCGTCTGT |
| | ATGCAGATCTCAATCGCCACGTGGATGCCTTGAATGCGTGGAGAAATGCCACCGTGCT |
| | GAAACCAGAGCACAGCCTGGCCTGGAACAACATGATTATACTCCTCGACAATACAGGT |
| | AATTTAGCCCAAGCTGAAGCAGTTGGAAGAGAGGCACTGGAATTAATACCTAATGATC |
| | ACTCTCTCATGTTCTCGTTGGCAAACGTGCTGGGGAAATCCCAGAAATACAAGGAATC |
| | TGAAGCTTTATTCCTCAAGGCAATTAAAGCAAATCCAAATGCTGCAAGTTACCATGGT |
| | AATTTGGCTGTGCTTTATCATCGTTGGGGACATCTAGACTTGGCCAAGAAACACTATG |
| | AAATCTCCTTGCAGCTTGACCCCACGGCATCAGGAACTAAGGAGAATTACGGTCTGCT |
| | GAGAAGAAAGCTAGAACTAATGCAAAAGAAAGCTGTCCTCCAG |

| | |
|---|---|
| ORF Start: at 7 | ORF Stop: at 850 |

| | | |
|---|---|---|
| SEQ ID NO: 162 | 281 aa | MW at 31997.2 kD |

| | |
|---|---|
| NOV23y, | SGEWRSEEQLFRSALSVCPLNAKVHYNIGKNLADKGNQTAAIRYYREAVRLNPKYVHA |
| CG57774-06 | |
| Protein Sequence | MNNLGNILKERNELQEAEELLSLAVQIQPDFAAAWMNLGIVQNSLKRFEAAEQSYRTA |
| | IKHRRKYPDCYYNLGRLYADLNRHVDALNAWRNATVLKPEHSLAWNNMIILLDNTGNL |
| | AQAEAVGREALELIPNDHSLMFSLANVLGKSQKYKESEALFLKAIKANPNAASYHGNL |
| | AVLYHRWGHLDLAKKHYEISLQLDPTASGTKENYGLLRRKLELMQKKAV |

| | |
|---|---|
| SEQ ID NO: 163 | 855 bp |

| | |
|---|---|
| NOV23z, | GAATTCAGCGGCGAGTGGCGGAGTGAGGAACAGCTTTTCAGAAGTGCTCTGTCTGTGT |
| CG57774-07 DNA | |
| Sequence | GTCCCCTCAATGCTAAGGTTCACTACAACATTGGCAAAAACCTGGCTGATAAAGGCAG |
| | CCAGACAGCTGCCATCAGATACTACCGGGAAGCTGTAAGATTAAATCCCAAGTATGTT |
| | CATGCCATGAATAATCTTGGAAATATCTTAAAAGAAAGGAATGAGCTACAGGAAGCTG |
| | AGGAGCTGCTGTCTTTGGCTGTTCAAATACAGCCAGACTTTGCCGCTGCGTGGATGAA |
| | TCTAGGCATAGTGCAGAATAGCCTGAAACGGTTTGAAGCAGCAGAGCAAAGTTATCGG |
| | ACAGCAATTAAACACAGAADGAAATACCCAGACTGTTACTACAACCTCGGGCGTCTGT |
| | ATGCAGATCTCAATCGCCACGTGGATGCCTTGAATGCGTGGAGAAATGCCACCGTGCT |
| | CAAACCAGAGCACAGCCTGGCCTGGAACAACATGATTATACTCCTCGACAATACAGGT |
| | AATTTAGCCCAAGCTGAAGCAGTTGGAAGAGAGGCACTGGAATTAATACCTAATGATC |
| | ACTCTCTCATGTTCTCGTTGGCAAACGTGCTGGGGAAATCCCAGAAATACAAGGAATC |
| | TGAAGCTTTATTCCTCAAGGCAATTAAAGCAAATCCAAATGCTGCAAGTTACCATGGT |
| | AATTTCGCTGTCCTTTATCATCGTTGGGGACATCTAGACTTGGCCAAGAAACACTATG |
| | AAATCTCCTTGCAGCTTGACCCCACGGCATCAGGAACTAAGGAGAATTACGGTCTGCT |
| | GAGAAGAAAGCTAGAACTAATGCAAAAGAAAGCTGTCCTCGAG |

| | |
|---|---|
| ORF Start: at 7 | ORF Stop: at 850 |

| | | |
|---|---|---|
| SEQ ID NO: 164 | 281 aa | MW at 31970.1 kD |

| | |
|---|---|
| NOV23z, | SGEWRSEEQLFRSALSVCPLNAKVHYNIGKNLADKGSQTAAIRYYREAVRLNPKYVHA |
| CG57774-07 | |
| Protein Sequence | MNNLGNILKERNELQEAEELLSLAVQIQPDFAAAWMNLGIVQNSLKRFEAAEQSYRTA |
| | IKHRRKYPDCYYNLGRLYADLNRHVDALNAWRNATVLKPEHSLAWNNMIILLDNTGNL |
| | AQAEAVGREALELIPNDHSLMFSLANVLGKSQKYKESEALFLKAIKANPNAASYHGNL |
| | AVLYHRWGHLDLAKKHYEISLQLDPTASGTKENYGLLRRKLELMQKKAV |

| | |
|---|---|
| SEQ ID NO: 165 | 855 bp |

| | |
|---|---|
| NOV23aa, | GAATTCAGCGGCGAGTGGCGGAGTGAGGAACAGCTTTTCAGAAGTGCTCTGTCTGTGT |
| CG57774-08 DNA | |
| Sequence | GTCCCCTCAATGCTAAGGTTCACCACAACATTGGCAAAAACCTGGCTGATAAAGGCAA |
| | CCAGACAGCTGCCATCAGATACTACCGGGAAGCTGTAAGATTAAATCCCAAGTATGTT |
| | CATGCCATGAATAATCTTGGAAATATCTTAAAAGAAAGGAATGAGCTACAGGAAGCTG |
| | AGGACCTGCTGTCTTTGGCTGTTCAAATACAGCCAGACTTTGCCGCTGCGTGGATGAA |
| | TCTAGGCATAGTGCAGAATAGCCTGAAACGGTTTGCCGCAGCAGAGCAAAGTTACCCG |
| | ACAGCAATTAAACACAGAAGGAAATACCCAGACTGTTACTACAACCTCGGGCGTCTGT |
| | ATGCAGATCTCAATCGCCACGTGGATGCCTTGAATGCGTGGAGAAATGCCACCCTGCT |
| | GAAACCAGAGCACAGCCTGGCCTCGAACAACATGATTATACTCCTCGACAATACAGGT |
| | AATTTAGCCCAAGCTGAAGCAGTTGGAAGAGAGGCACTGGAATTAATACCTAATGATC |
| | ACTCTCTCATGTTCTCGTTGGCAACGTGCTGGGGAAAATCCCAGAAATACAAGGAATC |
| | TGAAGCTTTATTCCTCAAGGCAATTAAAGCAAATCCAAATGCTGCAAGTTACCATGGT |
| | AATTTGGCTGTGCTTTATCATCGTTGGGGACATCTAGACTTGGCCAAGAAACACTATG |
| | AAATCTCCTTGCAGCTTGACCCCACGGCATCAGGAACTAAGGAGAATTACGGTCTGCT |
| | GAGAAGAAAGCTAGAACTAATGCAAAAGAAAGCTGTCCTCGAG |

| | |
|---|---|
| ORF Start: at 7 | ORF Stop: at 850 |

| | | |
|---|---|---|
| SEQ ID NO: 166 | 281 aa | MW at 31971.1 kD |

| | |
|---|---|
| NOV23aa, | SGEWRSEEQLFRSALSVCPLNAKVHHNIGKNLADKGNQTAAIRYYREAVRLNPKYVHA |
| CG57774-08 | |
| Protein Sequence | MNNLGNILKERNELQEAEELLSLAVQIQPDFAAAWMNLGIVQNSLKRFEAAEQSYRTA |
| | IKHRRKYPDCYYNLGRLYADLNRHVDALNAWRNATVLKPEHSLAWNNMIILLDNTGNL |
| | AQAEAVGREALELIPNDHSLMFSLANVLGKSQKYKESEALFLKAIKANPNAASYHGNL |
| | AVLYHRWGHLDLAKKHYEISLQLDPTASGTKENYGLLRRKLELMQKKAV |

| | |
|---|---|
| SEQ ID NO: 167 | 855 bp |

| | |
|---|---|
| NOV2ab, | GAATTCAGCGGCGAGTGGCGGAGTGAGGAACAGCTTTTCAGAAGTGCTCTGTCTGTGT |
| CG57774-09 DNA | |
| Sequence | GTCCCCTCAATGCTAAGGTTCACTACAACATTGGCAAAAACCTGGCTGATAAAGGCAA |
| | CCAGACAGCCGCCATCAGATACTACCGGGAAGCTGTAAGATTAAATCCCAAGTATGTT |
| | CATGCCATGAATAATCTTGGAAATATCTTAAAAGAAAGGAATGAGCTACAGGAAGCTG |
| | AGGAGCTGCTGTCTTTGGCTGTTCAAATACAGCCAGACTTTGCCGCTGCGTGGATGAA |
| | TCTAGGCATAGTGCAGAATAGCCTGAAACGGTTTGAAGCAGCAGAGCAAAGTTACCGG |
| | ACAGCAATTAAACACAGAAGGAAATACCCAGACTGTTACTACAACCTCGGGCGTCTGT |
| | ATGCAGATCTCAATCGCCACGTGGATGCCTTGAATGCGTGGAGAAATCCCACCGTGCT |
| | GAAACCAGAGCACAGCCTGGCCTGGAACAACATGATTATACTCCTCGACAATACAGGT |
| | AATTTAGCCCAAGCTGAAGCAGTTGGAAGAGAGGCACTGGAATTAATACCTAATGATC |
| | ACTCTCTCATGTTCTCGTTGGCAAACGTGCTGGGGAAATCCCAGAAATACAAGGAATC |
| | TGAAGCTTTATTCCTCAAGGCAATTAAAGCAAATCCAAATGCTGCAAGTTACCATGGT |
| | AATTTGGCTGTGCTTTATCATCGTTGGGGACATCTAGACTTGGCCAAGAAACACTATG |
| | AAATCTCCTTGCAGCTTCACCCCACGGCATCAGGAACTAAGGAGAATTACCGTCTGCT |
| | GAGAAGAAAGCTAGAACTAATGCAAAAGAAAGCTGTCCTCGAG |

| | |
|---|---|
| ORF Start: at 7 | ORF Stop: at 850 |

| | | |
|---|---|---|
| SEQ ID NO: 168 | 281 aa | MW at 31997.2 kD |

| | |
|---|---|
| NOV23ab, | SGEWRSEEQLFRSALSVCPLNAKVHYNIGKNLADKGNQTAAIRYYREAVRLNPKYVHA |
| CG57774-09 | |
| Protein Sequence | MNNLGNILKERNELQEAEELLSLAVQIQPDFAAAWMNLGIVQNSLKRFEAAEQSYRTA |
| | IKHRRKYPDCYYNLGRLYADLNRHVDALNAWRNATVLKPEHSLAWNNMIILLDNTGNL |
| | AQAEAVGREALELIPNDHSLMFSLANVLGKSQKYKESEALFLKAIKANPNAASYHGNL |
| | AVLYHRWGHLDLAKKNYEISLQLDPTASGTKENYGLLRRKLELMQKKAV |

| | |
|---|---|
| SEQ ID NO: 169 | 855 bp |

| | |
|---|---|
| NOV23ac, | GAATTCAGCGGCGAGTGGCGGAGTGAGGAACAGCTTTTCAGAAGTGCTCTGTCTGTGT |
| CG57774-10 DNA | |
| Sequence | GTCCCCTCAATGCTAAGGTTCACTACAACATTGGCAAAAACCTGGCTGATAAAGGCAA |
| | CCAGACAGCTGCCATCAGATACTACCGGGAAGCTGTAAGATTAAATCCCAAGTATGTT |
| | CATGCCATGAATAATCTTGGAAATATCTTAAAAGAAAGGAATGAGCTACAGGAAGTTG |
| | AGGAGCTGCTGTCTTTGGCTGTTCAAATACAGCCAGACTTTGCCGCTGCGTGGATGAA |
| | TCTAGGCATAGTGCAGAATAGCCTGAAACGGTTTGAAGCAGCAGAGCAAAGTTACCGG |
| | ACAGCAATTAAACACAGAAGGAAATACCCAGACTCTTACTACAACCTCGGGCGTCTGT |
| | ATGCAGATCTCAATCGCCACGTGGATGCCTTGAATGCGTGGAGAAATGCCACCGTGCT |
| | GAAACCAGAGCACAGCCTGGCCTGGAACAACATGATTATACTCCTCGACAATACAGGT |
| | AATTTAGCCCAAGCTGAAGCAGTTGGAAGAGAGGCACTGGAATTAATACCTAATGATC |
| | ACTCTCTCATGTTCTCGTTGGCAAACGTGCTGGGGAAATCCCAGAAATACAAGGAATC |
| | TGAAGCTTTATCCCTCAAGGCAATTAAAGCAAATCCAAATGCTGCAAGTTACCATGGT |
| | AATTTGGCTGTGCTTTATCATCGTTGGGGACATCTAGACTTGGCCAAGAAACACTATG |
| | AAATCTCCTTGCAGCTTGACCCCACGGCATCAGGAACTAAGGAGAATTACGGTCTGCT |
| | GAGAAGAAAGCTAGAACTAATGCAAAAGAAAGCTGTCCTCGAG |

| | |
|---|---|
| ORF Start: at 7 | ORF Stop: at 850 |

| | | |
|---|---|---|
| SEQ ID NO: 170 | 281 aa | MW at 32025.2 kD |

| | |
|---|---|
| NOV23ac, | SGEWRSEEQLFRSALSVCPLNAKVHYNIGKNLADKGNQTAAIRYYREAVRLNPKYVHA |
| CG57774-10 | |
| Protein Sequence | MNNLGNILKERNELQEVEELLSLAVQIQPDFAAAWMNLGIVQNSLKRFEAAEQSYRTA |
| | IKHRRKYPDCYYNLGRLYADLNRHVDALNAWRNATVLKPEHSLAWNNMIILLDNTGNL |
| | AQAEAVGREALELIPNDHSLMFSLANVLGKSQKYKESEALFLKAIKANPNAASYHGNL |
| | AVLYHRWGHLDLAKKHYEISLQLDPTASGTKENYGLLRRKLELMQKKAV |

| | |
|---|---|
| SEQ ID NO: 171 | 855 bp |

| | |
|---|---|
| NOV23ad, | GAATTCAGCGGCGAGTGGCGGAGTGAGGAACAGCTTTTCAGAAGTGCTCTGTCTGTGT |
| CG57774-11 DNA | |
| Sequence | GTCCCCTCAATGCTAAGGTTCACTACAACATTGGCAAAAACCTCGCTGATAAAGGCAA |
| | CCAGACAGCTGCCATCAGATACTACCGGGAAGCTGTAAGATTAAATCCCAAGTATGTT |
| | CATGCCATGAATAATCTTGGAAATATCTTAAAAGAAAGGAATGAGCTACAGGAAGCTG |
| | AGGAGCTGCTGTCTTTGGCTGTTCAAATACAGCCAGACTTTGCCGCTGCGTGGATGAA |
| | TCTAGGCATAGTGCAGAATAGCCTGAAACGGTTTGAAGCAGCAGAGCAAAGTTACCCG |
| | ACAGCAATTAAACACAGAAGGAAATACCCAGACTGTTACTACAACCTCGGGCGTCTGT |
| | ATGCAGATCTCAATCCCCACGTGGATGCCTTGAATGCGTGGAGAAATGCCACCGTGCT |
| | GAAACCAGAGCACAGCCTGGCCTGGAACAACATGATTATACTCCTCGACAATACAGGT |
| | AATTTAGCCCAAGCTGAAGCAGTTGGAAGAGAGGCACTGGAATTAATACCTAATGATC |
| | ACTCTCTCATGTTCTCGTTGGCAAACGTGCTGGGGAAATCCCAGAAATACAAGGAATC |
| | TGAAGCTTTATCCCTCAAGGCAATTAAAGCAAATCCAAATGCTGCAAGTTACCATGGT |
| | AATTTGGCTGTGCTTTATCATCGTTGGGGACATCTAGACTTGGCCAAGAAACACTATG |
| | AAATCTCCTTCCAGCTTGACCCCACGGCATCAGGAACTAAGGAGAATTACGGTCTGCT |
| | GAGAAGAAAGCTAGAACTAATGCAAAAGAAAGCTGTCCTCGAG |

| | |
|---|---|
| ORF Start: at 7 | ORF Stop: at 850 |

| | | |
|---|---|---|
| SEQ ID NO: 172 | 281 aa | MW at 31937.1 kD |

| | |
|---|---|
| NOV23ad, | SGEWRSEEQLFRSALSVCPLNAKVHYNIGKNLADKGNQTAAIRYYREAVRLNPKYVHA |
| CG57774-11 | |
| Protein Sequence | MNNLGNILKERNELQEAEELLSLAVQIQPDFAAAWMNLGIVQNSLKRFEAAEQSYRTA |
| | IKHRRKYPDCYYNLGRLYADLNRHVDALNAWRNATVLKPEHSLAWNNMIILLDNTGNL |
| | AQAEAVGREALELIPNDHSLMFSLANVLGKSQKYKESEALSLKAIKANPNAASYHGNL |
| | AVLYHRWGHLDLAKKHYEISLQLDPTASGTKENYGLLRRKLELMQKKAV |

| | |
|---|---|
| SEQ ID NO: 173 | 855 bp |

| | |
|---|---|
| NOV23ae, | GAATTCAGCGGCGAGTGGCGGAGTGAGGAACAGCTTTTCAGAAGTGCTCTGTCTGTGT |
| CG57774-12 DNA | |
| Sequence | GTCCCCTCAATGCTAAGGTTCACTACAACATTGGCAAAAACCTGGCTGATAAAGGCAA |
| | CCAGACAGCTGCCATCAGATACTACCGGGAAGCTGTAAGATTAAATCCCAAGTATGTT |
| | CATGCCATGAATAATCTTGGAAATATCTTAAAAGAAAGGAATGAGCTACAGGAAGCTG |
| | AGGAGCTGCTGTCTTTGGCTGTTCAAATACAGCCAGACTTTGCCGCTGCGTGGATGAA |
| | TCTAGGCATAGTGCAGAATAGCCTGAAACGGTTTGAAGCAGCAGAGCAAAGTTACCGG |
| | ACAGCAATTAAACACAGAAGGAAATACCCAGACTGTTACTACAACCTCGGGCGTCTGT |
| | ATGCAGATCTCAATCGCCACGTGGATGCCTTGAATGCGTGGAGAAATGCCACCGTGCT |
| | GAAACCACAGCACAGCCTGGCCTGGAACAACATGATTATACTCCTCGACAATACAGGT |
| | AATTTAGCCCAAGCTGAAGCAGTTGGAAGAGAGGCACTGGAATTAATACCTAATGATC |
| | ACTCTCTCATGTTCTCGTTGGCAAACGTGCTGGGGAAATCCCAGAAATACAAGGAATC |
| | TCAAGCTTTATTCCTCAAGGCAATTAAAGCAAATCCAAATGCTGCAAGTTACCATGGT |
| | AATTTGGCTGTGCTTTATCATCGTTGGGGACATCTAGACTTGGCCAAGAAACACCATG |
| | AAATCTCCTTGCAGCTTGACCCCACGGCATCAGGAACTAAGGAGAATTACGGTCTCCT |
| | GAGAAGAAAGCTAGAACTAATGCAAAACAAAGCTGTCCTCGAG |

| | |
|---|---|
| Start: at 7 | ORF Stop: at 850 |

| | | |
|---|---|---|
| SEQ ID NO: 174 | 281 aa | MW at 31971.1 kD |

| | |
|---|---|
| NOV23ae, | SGEWRSEEQLFRSALSVCPLNAKVHYNIGKNLADKGNQTAAIRYYREAVRLNPKYVHA |
| CG57774-12 | |
| Protein Sequence | MNNLGNILKERNELQEAEELLSLAVQIQPDFAAAWMNLGIVQNSLKRFEAAEQSYRTA |
| | IKHRRKYPDCYYNLGRLYADLNRHVDALNAWRNATVLKPEHSLAWNNMIILLDNTGNL |
| | AQAEAVCREALELIPNDHSLMFSLANVLGKSQKYKESEALFLKAIKANPNAASYHGNL |
| | AVLYHRWGHLDLAKKHHEISLQLDPTASGTKENYGLLRRKLELMQKKAV |

| | |
|---|---|
| SEQ ID NO: 175 | 855 bp |

| | |
|---|---|
| NOV23af, | GAATTCAGCGGCGAGTGGCGGAGTGAGGAACAGCTTTTCAGAAGTGCTCTGTCTGTGT |
| CG57774-13 DNA | |
| Sequence | GTCCCCTCAATGCTAAGGTTCACTACAACATTGGCAAAAACCTGGCTGATAAAGGCAA |
| | CCAGACAGCTGCCATCAGATACTACCGGGAAGCTGTAAGATTAAATCCCAAGTATGTT |
| | CATGCCATGAATAATCTTGGAAATATCTTAAAAGAAAGGAATGAGCTACAGGAAGCTG |
| | AGGAGCTGCTGTCTTTGGCTGTTCAAATACAGCCAGACTTTCCCGCTGCGTGGATGAA |
| | TCTAGGCATAGTGCAGAATAUCCTGAAACGGTTTGAAGCAGCAGAGCAAAGTTACCGG |
| | ACAGCAATTAAACACAGAACGAAATACCCAGACTGTTACTACAACCTCGGGCGTCTGT |
| | ATGCAGATCTCAATCGCCACGTGGATGCCTTGAATGCGTGGAGAAATGCCACCGTGCT |
| | GAAACCAGAGCACAGCCTGCCCTGGAACAACATGATTATACTCCTCGACAATACAGGT |
| | AATTTAGCCCAAGCTGAAGCAGTTGGAACACAGGCACTGGAATTAATACCTAATGATC |
| | ACTCTCTCATGTTCTCGTTGGCAAACGTGCTGGGGAAATCCCAGAAATACAGGGAATC |
| | TGAAGCTTTATTCCTCAAGGCAATTAAAGCAAATCCAAATGCTGCAAGTTACCATGGT |
| | AATTTGGCTGTGCTTTATCATCGTTGGGGACATCTAGACTTGGCCAAGAAACACTATG |
| | AAATCTCCTTGCAGCTTGACCCCACGGCATCAGGAACTAAGGAGAATTACGGTCTGCT |
| | GAGAAGAAAGCTAGAACTAATGCAAAAGAAAGCTGTCCTCGAG |

| | |
|---|---|
| ORF Start: at 7 | ORF Stop: at 850 |

| | | |
|---|---|---|
| SEQ ID NO: 176 | 281 aa | MW at 32025.2 kD |

| | |
|---|---|
| NOV23af, | SGEWRSEEQLFRSALSVCPLNAKVHYNIGKNLADKGNQTAAIRYYREAVRLNPKYVHA |
| CG57774-13 | |
| Protein Sequence | MNNLGNILKERNELQEAEELLSLAVQIQPDFAAAWMNLGIVQNSLKRFEAAEQSYRTA |
| | IKERRKYPDCYYNLGRLYADLNRHVDALNAWRNATVLKPEHSLAWNNMIILLDNTGNL |
| | AQAEAVGREALELIPNDHSLMFSLANVLGKSQKYRESEALFLKAIKANPNAASYHGNL |
| | AVLYHRWGIILDLAKKHYEISLQLDPTASGTKENYGLLRRKLELMQKKAV |

[0489] Sequence comparison of the above protein sequences yields the following sequence relationships shown in Table 23B.

TABLE 23B
Comparison of NOV23a against NOV23b through NOV23af.

| | | Identities/ |
|---|---|---|
| | | Similarities for |
| Protein | NOV23a Residues/ | the Matched |
| Sequence | Match Residues | Region |
| NOV23b | 24 . . . 524 | 501/501 (100%) |
| | 3 . . . 503 | 501/501 (100%) |
| NOV23c | 24 . . . 524 | 500/501 (99%) |
| | 3 . . . 503 | 500/501 (99%) |
| NOV23d | 24 . . . 524 | 500/501 (99%) |
| | 3 . . . 503 | 500/501 (99%) |
| NOV23e | 24 . . . 524 | 499/501 (99%) |
| | 3 . . . 503 | 499/501 (99%) |
| NOV23f | 24 . . . 524 | 500/501 (99%) |
| | 3 . . . 503 | 500/501 (99%) |
| NOV23g | 24 . . . 524 | 501/501 (100%) |
| | 3 . . . 503 | 501/501 (100%) |
| NOV23h | 24 . . . 524 | 500/501 (99%) |
| | 3 . . . 503 | 500/501 (99%) |
| NOV23i | 24 . . . 524 | 499/501 (99%) |
| | 3 . . . 503 | 499/501 (99%) |
| NOV23j | 24 . . . 524 | 500/501 (99%) |
| | 3 . . . 503 | 501/501 (99%) |
| NOV23k | 24 . . . 524 | 500/501 (99%) |
| | 3 . . . 503 | 501/501 (99%) |
| NOV23l | 24 . . . 524 | 499/501 (99%) |
| | 3 . . . 503 | 500/501 (99%) |
| NOV23m | 244 . . . 524 | 280/281 (99%) |
| | 3 . . . 283 | 281/281 (99%) |
| NOV23n | 244 . . . 524 | 280/281 (99%) |
| | 3 . . . 283 | 281/281 (99%) |
| NOV23o | 244 . . . 524 | 281/281 (100%) |
| | 3 . . . 283 | 281/281 (100%) |
| NOV23p | 244 . . . 524 | 280/281 (99%) |
| | 3 . . . 283 | 280/281 (99%) |
| NOV23q | 244 . . . 524 | 280/281 (99%) |
| | 3 . . . 283 | 280/281 (99%) |
| NOV23r | 244 . . . 524 | 280/281 (99%) |
| | 3 . . . 283 | 281/281 (99%) |
| NOV23s | 244 . . . 524 | 280/281 (99%) |
| | 3 . . . 283 | 281/281 (99%) |
| NOV23t | 24 . . . 524 | 499/501 (99%) |
| | 3 . . . 503 | 500/501 (99%) |
| NOV23u | 244 . . . 524 | 281/281 (100%) |
| | 1 . . . 281 | 281/281 (100%) |
| NOV23v | 24 . . . 524 | 501/501 (100%) |
| | 1 . . . 501 | 501/501 (100%) |
| NOV23w | 24 . . . 524 | 501/501 (100%) |
| | 1 . . . 501 | 501/501 (100%) |
| NOV23x | 24 . . . 524 | 500/501 (99%) |
| | 1 . . . 501 | 500/501 (99%) |
| NOV23y | 244 . . . 524 | 281/281 (100%) |
| | 1 . . . 281 | 281/281 (100%) |
| NOV23z | 244 . . . 524 | 280/281 (99%) |
| | 1 . . . 281 | 281/281 (99%) |
| NOV23aa | 244 . . . 524 | 280/281 (99%) |
| | 1 . . . 281 | 281/281 (99%) |
| NOV23ab | 244 . . . 524 | 281/281 (100%) |
| | 1 . . . 281 | 281/281 (100%) |
| NOV23ac | 244 . . . 524 | 280/281 (99%) |
| | 1 . . . 281 | 280/281 (99%) |
| NOV23ad | 244 . . . 524 | 280/281 (99%) |
| | 1 . . . 281 | 280/281 (99%) |
| NOV23ae | 244 . . . 524 | 280/281 (99%) |
| | 1 . . . 281 | 281/281 (99%) |
| NOV23af | 244 . . . 524 | 280/281 (99%) |
| | 1 . . . 281 | 281/281 (99%) |

[0490] Further analysis of the NOV23a protein yielded the following properties shown in Table 23C.

TABLE 23C
Protein Sequence Properties NOV23a

| | |
|---|---|
| PSort | 0.6850 probability located in endoplasmic reticulum |
| analysis: | (membrane); 0.6400 probability located in plasma membrane; |
| | 0.4600 probability located in Golgi body; 0.1000 probability |
| | located in endoplasmic reticulum (lumen) |
| SignalP | Cleavage site between residues 24 and 25 |
| analysis: | |

[0491] A search of the NOV23a protein against the Geneseq database, a proprietary database that contains sequences published in patents and patent publication, yielded several homologous proteins shown in Table 23D.

TABLE 23D
Geneseq Results for NOV23a

| | | NOV23a | Identities/ | |
|---|---|---|---|---|
| | | Residues/ | Similarities | |
| Geneseq | Protein/Organism/Length | Match | for the Matched | Expect |
| Identifier | [Patent #, Date] | Residues | Region | Value |
| AAE22157 | Human TRNFR-19 protein - | 1 . . . 524 | 524/524 (100%) | 0.0 |
| | Homo sapiens, 760 aa. | 237 . . . 760 | 524/524 (100%) | |
| | [WO200226950-A2, 04 APR. | | | |
| | 2002] | | | |
| AAM41435 | Human polypeptide SEQ ID NO | 1 . . . 524 | 524/524 (100%) | 0.0 |
| | 6366 - Homo sapiens, 547 aa. | 24 . . . 547 | 524/524 (100%) | |
| | [WO200153312-A1, 26 JUL. | | | |
| | 2001] | | | |
| AAM39649 | Human polypeptide SEQ ID NO | 1 . . . 524 | 524/524 (100%) | 0.0 |
| | 2794 - Homo sapiens, 524 aa. | 1 . . . 524 | 524/524 (100%) | |
| | [WO200153312-A1, 26 JUL. | | | |
| | 2001] | | | |
| AAE05188 | Human drug metabolising | 1 . . . 524 | 523/524 (99%) | 0.0 |
| | enzyme (DME-19) protein - | 218 . . . 741 | 524/524 (99%) | |
| | Homo sapiens, 741 aa. | | | |
| | [WO200151638-A2, 19 JUL. | | | |
| | 2001] | | | |
| AAB12140 | Hydrophobic domain protein | 1 . . . 524 | 523/524 (99%) | 0.0 |
| | isolated from WERI-RB cells - | 126 . . . 649 | 524/524 (99%) | |
| | Homo sapiens, 649 aa. | | | |
| | [WO200029448-A2, 25 MAY | | | |
| | 2000] | | | |

[0492] In a BLAST search of public sequence datbases, the NOV23a protein was found to have homology to the proteins shown in the BLASTP data in Table 23E.

TABLE 23E
Public BLASTP Results for NOV23a

| | | NOV23a | Identities/ | |
|---|---|---|---|---|
| Protein | | Residues/ | Similarities | |
| Accession | | Match | for the | Expect |
| Number | Protein/Organism/Length | Residues | Matched Portion | Value |
| Q9BGZ6 | Hypothetical 59.2 kDa protein - | 1 . . . 524 | 513/524 (97%) | 0.0 |
| | Macaca fascicularis (Crab | 1 . . . 524 | 519/524 (98%) | |
| | eating macaque) (Cynomolgus | | | |
| | monkey), 524 aa. | | | |
| AAH31368 | Hypothetical protein - Mus | 1 . . . 524 | 479/524 (91%) | 0.0 |
| | musculus (Mouse), 524 aa. | 1 . . . 524 | 496/524 (94%) | |
| Q96SU8 | CDNA FLJ14624 fis, clone | 46 . . . 524 | 476/479 (99%) | 0.0 |
| | NT2RP2000248, weakly similar to | 1 . . . 479 | 477/479 (99%) | |
| | UDP-N-acetylglucosamine-- | | | |
| | peptide N- | | | |
| | acetylglucosaminyltransferase | | | |
| | 110 kDa subunit (EC 2.4.1.-) - | | | |
| | Homo sapiens (Human), 479 aa. | | | |
| Q8WV63 | Hypothetical 44.5 kDa protein - | 1 . . . 376 | 376/376 (100%) | 0.0 |
| | Homo sapiens (Human), 395 aa. | 1 . . . 376 | 376/376 (100%) | |
| Q9CS83 | 5730419014Rik protein - Mus | 227 . . . 524 | 281/298 (94%) | e−163 |
| | musculus (Mouse), 298 aa | 1 . . . 298 | 287/298 (96%) | |
| | (fragment). | | | |

[0493] PFam analysis predicts that the NOV23a protein contains the domains shown in the Table 23F.

TABLE 23F
Domain Analysis of NOV23a

| | | Identities/ | |
|---|---|---|---|
| | | Similarities for | |
| Pfam | NOV23a | the Matched | Expect |
| Domain | Match Region | Region | Value |
| TPR | 265 . . . 298 | 11/34 (32%) | 1.1e−05 |
| | | 27/34 (79%) | |
| TPR | 299 . . . 332 | 10/34 (29%) | 0.0026 |
| | | 28/34 (82%) | |
| TPR | 333 . . . 366 | 9/34 (26%) | 4.8e−06 |
| | | 28/34 (82%) | |
| TPR | 367 . . . 400 | 11/34 (32%) | 7.4e−05 |
| | | 24/34 (71%) | |
| TPR | 435 . . . 468 | 10/34 (29%) | 0.88 |
| | | 22/34 (65%) | |
| TPR | 469 . . . 502 | 13/34 (38%) | 0.00063 |
| | | 24/34 (71%) | |

### Example 24

[0494] The NOV24 clone was analyzed, and the nucleotide and encoded polypeptide sequences are shown in Table 24A.

TABLE 24A
NOV24 Sequence Analysis

| | |
|---|---|
| SEQ ID NO: 177 | 2107 bp |

| | |
|---|---|
| NOV24a, | GCCTTTTTTTTTTTTTTTTTTTTTTTTTTTTTAAGAGACAGAATCTCGCTCTGCCACC |
| CG89285-01 DNA | |
| Sequence | CAGGCCGGAGTGCAGTGGCGCGATCACAGCTCACTGCAGCCTTGACCTCCCGGGCTCA |
| | AGTGATCTTCCCGCCTCAGATTCCGGAGCAGCTAGGACCCCAGACAGCACCACCACAC |
| | CTGGCTTCACACGCCTTGCCGTCCGCTGCTAGCTGATACCCCACGTGGCACTCACAGC |
| | GGCCGAGGCCCCGGACCACCTGGCACCTGTGCATGCAGCTGCCGTTCCTGTTGGCACA |
| | CGGGCTTCTACGGACACAATGCCTGCCGTCCTCCTGGAGCTGGAACCCGCGCCGGCAC |
| | TGGCAGCGATGCCGAGTGATTGTGAGCTGGACACAGTGGTGCTGGCAGCCGCCATTGC |
| | CCAGGGCGCAGGAGTTAATGGCCAGGCAGGTCCTGCTGTCAGGGAATTCAGCGGCCGC |
| | TGAATTCTAGCTAGAATTCAGCGGCCGCTGAATTCTAGCAGACGGCTTTGGAATCCAC |
| | CAGCTACATCCAGCTCCCTGAGGCAGAGTTGAGAATGGAGAGAATGTTACCTCTCCTG |
| | GCTCTGGGGCTCTTGGCGGCTGGGTTCTGCCCTGCTGTCCTCTGCCACCCTAACAGCC |
| | CACTTGACGAGGAGAATCTGACCCAGGAGAACCAAGACCGAGGGACACACGTGGACCT |
| | CGGATTAGCCTCCGCCAACGTGGACTTCGCTTTCAGCCTGTACAAGCAGTTAGTCCTG |
| | AAGGCCCCTGATAAGAATGTCATCTTCTCCCCACTGAGCATCTCCACCGCCTTGGCCT |
| | TCCTGTCTCTGGGGGCCCATAATACCACCCTGACAGAGATTCTCAAAGGCCTCAAGTT |
| | CAACCTCACGGAGACTTCTGAGGCAGAAATTCAACCAACCTTCCAGCACCTCCTGCGC |
| | ACTCTCAATCAGTCCAGCGATGAGCTGCAGCTGAGTATGGGAAATGCCATGTTTCTCA |
| | AAGAGCAACTCAGTCTGCTGGACAGGTTCACGGAGGATGCCAAGAGGCTGTATGGCTC |
| | CGAGGCCTTTGCCACTGACTTTCAGGACTCAGCTGCAGCTAAGAAGCTCATCAACGAC |
| | TACGTGAAGAATGGAACTAGGGGGAAAATCACAGATCTGATCAAGGACCTTGACTCGC |
| | AGACAATGATGGTCCTGGTGAATTACATCTTCTTTAAAGCCAAATGGGACATGCCCTT |
| | TGACCCCCAAGATACTCATCAGTCAAGGTTCTACTTGAGCAAGAAAAAGTGGGTAATG |
| | GTGCCCATGATGAGTTTGCATCACCTGACTATACCTTACTTCCGGGACGAGGAGCTGT |
| | CCTGCACCGTGGTGGAGCTGAAGTACACAGGCAATGCCAGCGCACTCTTCATCCTCCC |
| | TGATCAAGACAAGATGGAGGAAGTGGAAGCCATGCTGCTCCCAGAGACCCTGAAGCGG |
| | TGGAGAGACTCTCTGGAGTTCAGAGAGATAGGTGAGCTCTACCTGCCAAAGTTTTCCA |
| | TCTCGAGCGACTATAACCTCAACGACATACTTCTCCAGCTGGGCATTGAGGAAGCCTT |
| | CACCAGCAAGGCTGACCTGTCAGGGATCACAGGGGCCAGGAACCTAGCAGTCTCCCAG |
| | GTGGTCCATAAGGCTGTGCTTGATGTATTTGAGGAGGGCACAGAAGCATCTGCTGCCA |
| | CAGCAGTCAAAATCACCCTCCTTTCTGCATTAGTGGAGACAAGGACCATTGTGCGTTT |
| | CAACAGGCCCTTCCTGATGATCATTGTCCCTACAGACACCCAGAACATCTTCTTCATG |
| | AGCAAAGTCACCAATCCCAAGCAAGCCTAGAGCTTGCCATCAAGCAGTGGGGCTCTCA |
| | GTAAGGAACTTGGAATGCAAGCTGGATGCCTGGGTCTCTGGGCACAGCCTGGCCCCTG |
| | TGCACCGAGTGGCCATGGCATGTGTGGCCCTGTCTGCTTATCCTTGGAAGGTGACAGC |
| | GATTCCCTGTGTAGCTCTCACATGCACAGGGGCCCATGGACTCTTCAGTCTGGAGGGT |
| | CCTGGGCCTCCTGACAGCAATAAATAATTTCGTTGGAAGGGCGATTCCAGCACACTTG |
| | TGGGCGACAATAAGTTTAA |

| | |
|---|---|
| ORF Start: ATG at 557 | ORF Stop: TAG at 1826 |

| | | |
|---|---|---|
| SEQ ID NO: 178 | 423 aa | MW at 47664.3 kD |

| | |
|---|---|
| NOV24a, | MERMLPLLALGLLAAGFCPAVLCHPNSPLDEENLTQENQDRGTHVDLGLASAAVDFAF |
| CG89285-01 | |
| Protein Sequence | SLYKQLVLKAPDKNVIFSPLSISTALAFLSLGAHNTTLTEILKGLKFNLTETSEAEIH |
| | QTFQHLLRTLNQSSDELQLSMGNAMFVKEQLSLLDRFTEDAKRLYGSEAFATDFQDSA |
| | AAKKLINDYVKNGTRGKITDLIKDLDSQTMMVLVNYIFFKAKWEMPFDPQDTHQSRFY |
| | LSKKKWVMVPMMSLHHLTIPYFRDEELSCTVVELKYTGNASALFILPDQDKMEEVEAA |
| | LLPETLKRWRDSLEFREIGELYLPKFSISRDYNLNDILLQLGIEEAFTSKADLSGITG |
| | ARNLAVSQVVHKAVLDVFEEGTEASAATAVKITLLSAAVETRTIVRFNRPFLMIIVPT |
| | DTQNIFFMSKVTNPKQA |

| | |
|---|---|
| SEQ ID NO: 179 | 1281 bp |

| | |
|---|---|
| NOV24b, | TACTCCAGACAGACGGCTTTGGAATCCACCAGCTACATCCAGCTCCCTGAGGCAGAGT |
| CG89285-04 DNA | |
| Sequence | TGAGAATGGAGAGAATGTTACCTCTCCTGACTCTGGGGCTCTTGGCGGCTGCGTTCTG |
| | CCCTGCTGTCCTCTGCCACCCTAACAGCCCACTTGACGAGGAGAATCTGACCCAGGAG |
| | AACCAAGACCGAGGGACACACGTGGACCTCGGATTAGCCTCCGCCAACGTCGACTTCG |
| | CTTTCAGCCTGTACAAGCAGTTAGTCCTGAAGGCCCCTGATAAGAATGTCATCTTCTC |
| | CCCACTGAGCATCTCCACCGCCTTGGCCTTCCTGTCTCTGGGGGCCCATAATACCACC |
| | CTGACAGAGATTCTCAAAGGCCTCAAGTTCAACCTCACGGAGACTTCTGAGGCAGAAA |
| | TTCACCAGAGCTTCCAGCACCTCCTGCGCACCCTCAATCAGTCCAGCGATGAGCTGCA |
| | GCTGAGTATGGGAAATGCCATGTTTGTCAAAGAGCAACTCAGTCTGCTGGACAGGTTC |
| | ACGGAGGATGCCAAGAGGCTGTATGGCTCCGAGGCCTTTGCCACTGACTTTCAGGACT |
| | CAGCTGCAGCTAAGAAGCTCATCAACGACTACGTGAAGAATGGAACTAGGGGGAAAAT |
| | CACAGATCTGATCAAGGACCTTGACTCGCAGACAATGATCGTCCTGGTGAATTACATC |
| | TTCTTTAAAGCCAAATGGGAGATGCCCTTTGACCCCCAAGATACTCATCAGTCAAGGT |
| | TCTACTTGAGCAAGAAAAAGTGGGTAATGGTGCCCATGATGAGTTTGCATCACCTGAC |
| | TATACCTTACTTCCGGGACGAGGAGCTGTCCTGCACCGTGGTGGAGCTGAAGTACACA |
| | GGCAATGCCAGCGCACTCTTCATCCTCCCTGATCAACACAAGATGGAGGAAGTGGAAG |
| | CCATGCTGCTCCCAGAGACCCTGAAGCGGTGGAGAGACTCTCTGGAGTTCAGAGAGAT |
| | AGGTGAGCTCTACCTGCCAAAGTTTTCCATCTCGAGGGACTATAACCTGAACCACATA |
| | CTTCTCCAGCTGGGCATTGAGGAAGCCTTCACCAGCAAGGCTGACCTGTCAAGGACCA |
| | TTGTGCGTTTCAACAGGCCCTTCCTGATGATCATTGTCCCTACAGACACCCAGAACAT |
| | CTTCTTCATGAGCAAAGTCACCAATCCCAAGCAAGCCTAGAGCTTGCCATCAAGCAGT |
| | GGGGCTCTCAGTAAGGAACTTGGAATTCAAACTGGATTCCTGGGTCTCTGGGCACAAC |
| | CTGGC |

| | |
|---|---|
| ORF Start: ATG at 64 | ORF Stop: TAG at 1198 |

| | | |
|---|---|---|
| SEQ ID NO: 180 | 378 aa | MW at 43117.1 kD |

| | |
|---|---|
| NOV24b, | MERMLPLLTLGLLAAGFCPAVLCHPNSPLDEENLTQENQDRGTHVDLGLASAAADFAF |
| CG89285-04 | |
| Protein Sequence | SLYKQLVLKAPDKNVIFSPLSISTALAFLSLGAHNTTLTEILKGLKFNLTETSEAEIH |
| | QSFQHLLRTLNQSSDELQLSMGNAMFVKEQLSLLDRFTEDAKRLYGSEAFATDFQDSA |
| | AAKKLINDYVKNGTRGKITDLIKDLDSQTMMVLVNYIFFKAKWEMPFDPQDTHQSRFY |
| | LSKKKWVMVPMMSLHHLTIPYFRDEELSCTVVELKYTGNASALFILPDQDKMEEVEAM |
| | LLPETLKRWRDSLEFREIGELYLPKFSISRDYNLNDTLLQLGIEEAFTSKADLSRTIV |
| | RFNRPFLMIIVPTDTQNIFFMSKVTNPKQA |

| | |
|---|---|
| SEQ ID NO: 181 | 12852 bp |

| | |
|---|---|
| NOV24c, | GCTTTGGAATCCACCAGCTACATCCAGCTCCCTGAGGCAGAGTTGAGAATGGAGAGAA |
| CG89285-03 DNA | |
| Sequence | TGTTACCTCTCCTGACTCTGGGGCTCTTGGCGGCTGGGTTCTGCCCTGCTGTCCTCTG |
| | CCACCCTAACAGCCCACTTGACGAGGAGAATCTGACCCAGGAGAACCAAGACCGAGGG |
| | ACACACGTGGACCTCGGATTAGCCTCCGCCAACGTGGACTTCGCTTTCAGCCTGTACA |
| | AGCAGTTAGTCCTGAAGGCCCCTGATAAGAATGTCATCTTCTCCCCACTGAGCATCTC |
| | CACCGCCTTGGCCTTCCTGTCTCTGGGGGCCCATAATACCACCCTGACAGAGATTCTC |
| | AAAGGCCTCAAGTTCAACCTCACGGAGACTTCTGAGGCAGAAATTCACCAAACCTTCC |
| | ACCACCTCCTGCGCACCCTCAATCAGTCCAGCGATGAGCTGCAGCTGAGTATGGGAAA |
| | TGCCATGTTTGTCAAAGAGCAACTCAGTCTGCTGGACAGGTTCACGGAGGATGCCAAG |
| | AGGCTGTATGGCTCCGAGGCCTTTGCCACTGACTTTCACGACTCAGCTGCAGCTAAGA |
| | AGCTCATCAACGACTACGTGAAGAATGGAACTAGGGGGAAAATCACAGATCTGATCAA |
| | GGACCTTGACTCGCAGACAATGATGGTCCTGGTGAATTACATCTTCTTTAAAGAGAGA |
| | TAGGTGAGCTCTACCTGCCAAAGTTTTCCATCTCGAGGGACTATAACCTGAACGACAT |
| | ACTTCTCCAGCTGGGCATTGAGGAAGCCTTCACCAGCAAGGCTGACCTGTCAGGGATC |
| | ACAGGGGCCAGGAACCTAGCAGTCTCCCAGGTGGTCCATAAGGCTGTGCTTGATGTAT |
| | TTGAGGAGGGCACAGAAGCATCTGCTGCCACAGCAGTCAAAATCACCCTCCTTTCTGC |
| | ATTAGTGGAGACAAGGACCATTGTGCGTTTCAACAGGCCCTTCCTGATGATCATTGTC |
| | CCTACAGACACCCAGAACATCTTCTTCATGAGCAAAGTCACCAATCCCAAGCAAGCCT |
| | AGAGCTTCCCATCAAGCAGTGGGGCTCTCAGTAAGGAACTTGGAATGCAAGCTGGATG |
| | CCTGGGTCTCTGGGCACAGCCTGGCCCCTGTGCACCGAGTGTCCATGGCATGTATGGC |
| | CCTGTCTGCTTATCCTTGGAAGATGACAGCGAATCCCTGTGAAGCTCTCACATGCACA |
| | GGGGCCCATGGACTCTTCATTCTGGAGGGTCCTGGGCCTCCTGACAGCAACAAATAAT |
| | ATCGTT |

| | |
|---|---|
| ORF Start: ATG at 49 | ORF Stop: TAG at 697 |

| | | |
|---|---|---|
| SEQ ID NO: 182 | 216 aa | MW at 24086.2 kD |

| | |
|---|---|
| NOV24c, | MERMLPLLTLGLLAAGFCPAVLCHPNSPLDEENLTQENQDRGTHVDLGLASAAVDFAF |
| CG89285-03 | |
| Protein Sequence | SLYKQLVLKAPDKNVIFSPLSISTALAFLSLGAHNTTLTEILKGLKFNLTETSEAEIH |
| | QTFHHLLRTLNQSSDELQLSMGNAMFVKEQLSLLDRFTEDAKRLYGSEAFATDFQDSA |
| | AAKKLINDYVKNGTRGKITDLIKDLDSQTMMVLVNYIFFKER |

| | |
|---|---|
| SEQ ID NO: 183 | 667 bp |

| | |
|---|---|
| NOV24d, | CACCAAGCTTATGGAGAGAATGTTACCTCTCCTGACTCTGGGGCTCTTGGCGGCTGGG |
| 306418132 DNA | |
| Sequence | TTCTGCCCTGCTGTCCTCTGCCACCCTAACAGCCCACTTGACGAGGAGAATCTGACCC |
| | AGGAGAACCAAGACCGAGGGACACACGTGGACCTCGGATTAGCCTCCGCCAACGTGGA |
| | CTTCGCTTTCAGCCTGTACAAGCAGTTAGTCCTGAAGGCCCCTGATAAGAATGTCATC |
| | TTCTCCCCACTGAGCATCTCCACCGCCTTGGCCTTCCTGTCTCTGGGGGCCCATAATA |
| | CCACCCTGACAGAGATTCTCAAAGGCCTCAAGTTCAACCTCACGGAGACTTCTGAGGC |
| | AGAAATTCACCAGAGCTTCCAGCACCTCCTGCGCACCCTCAATCAGTCCAGCGATGAG |
| | CTGCAGCTGAGTATGGGAAATGCCATGTTTGTCAAAGAGCAACTCAGTCTGCTGGACA |
| | GGTTCACGGAGGATGCCAAGAGGCTGTATGGCTCCGAGGCCTTTGCCACTGACTTTCA |
| | GGACTCAGCTGCAGCTAAGAAGCTCATCAACGACTACGTGAAGAATGGAACTAGGGGG |
| | AAAATCACAGATCTGATCAAGGACCTTGACTCGCAGACAATGATGGTCCTGGTGAATT |
| | ACATCTTCTTTAAAGAGAGAGTCGACGGC |

| | |
|---|---|
| ORF Start: at 2 | ORF Stop: end of sequence |

| | | |
|---|---|---|
| SEQ ID NO: 184 | 222 aa | MW at 24676.9 kD |

| | |
|---|---|
| NOV24d, | TKLMERMLPLLTLGLLAAGFCPAVLCHPNSPLDEENLTQENQDRGTHAALGLASAAVD |
| 306418132 | |
| Protein Sequence | FAFSLYKQLVLKAPDKNVIFSPLSISTALAFLSLGAHNTTLTEILKGLKFNLTETSEA |
| | EIHQSFQHLLRTLNQSSDELQLSMGNAMFVKEQLSLLDRFTEDAKRLYGSEAFATDFQ |
| | DSAAAKKLINDYVKNGTRGKITDLIKDLDSQTMMVLVNYIFFKERVDG |

| | |
|---|---|
| SEQ ID NO: 1851 | 1603 bp |

| | |
|---|---|
| NOV24e, | GACGGCTTTGGAATCCACCAGCTACATCCAGCTCCCTGAGGCAGAGTTGAGAATGGAG |
| CG89285-02 DNA | |
| Sequence | AGAATGTTACCTCTCCTGGCTCTGGGGCTCTTGGCGGCTGGGTTCTGCCCTGCTGTCC |
| | TCTGCCACCCTAACAGCCCACTTGACGAGGAGAATCTGACCCAGGAGAACCAAGACCG |
| | AGGGACACACGTGGACCTCGGATTAGCCTCCGCCAACGTGGACTTCGCTTTCAGCCTG |
| | TACAAGCAGTTAGTCCTGAAGGCCCCTGATAAGAATGTCATCTTCTCCCCACTGAGCA |
| | TCTCCACCGCCTTGGCCTTCCTGTCTCTGGGGGCCCATAATACCACCCTGACAGAGAT |
| | TCTCAAAGGCCTCAAGTTCAACCTCACGGAGACTTCTGAGGCAGAAATTCACCAGAGC |
| | TTCCAGCACCTCCTGCGCACCCTCAATCAGTCCAGCGATGAGCTGCAGCTGAGTATGG |
| | GAAATGCCATGTTTGTCAAAGAGCAACTCAGTCTGCTGGACAGGTTCACGGAGGATGC |
| | CAAGAGGCTGTATGGCTCCGAGGCCTTTGCCACTGACTTTCAGGACTCAGCTGCAGCT |
| | AAGAAGCTCATCAACGACTACGTGAAGAATGGAACTAGGGGGAAAATCACAGATCTGA |
| | TCAACGACCTTGACTCGCAGACAATGATGGTCCTGGTGAATTACATCTTCTTTAAAGC |
| | CAAATGGGAGATGCCCTTTGACCCCCAAGATACTCATCAGTCAAGGTTCTACTTGAGC |
| | AAGAAAAAGTGGGTAATGGTGCCCATGATGAGTTTGCATCACCTGACTATACCTTACT |
| | TCCGGGACGAGGAGCTGTCCTGCACCGTGGTGGAGCTGAAGTACACAGGCAATGCCAG |
| | CGCACTCTTCATCCTCCCTGATCAAGACAAGATGGAGGAAGTGGAAGCCATGCTGCTC |
| | CCAGAGACCCTGAAGCGGTGGAGAGACTCTCTGGAGTTCAGAGAGATAGGTGAGCTCT |
| | ACCTGCCAAAGTTTTCCATCTCGAGGGACTATAACCTGAACGACATACTTCTCCAGCT |
| | GGGCATTGAGGAAGCCTTCACCAGCAAGGCTGACCTGTCAGGGATCACAGGGGCCAGG |
| | AACCTAGCAGTCTCCCAGGTGGTCCATAAGGCTGTGCTTGATGTATTTGAGGACGGCA |
| | CAGAAGCATCTGCTGCCACAGCAGTCAAAATCACCCTCCTTTCTGCATTAGTGGAGAC |
| | AAGGACCATTGTGCGTTTCAACAGGCCCTTCCTGATGATCATTGTCCCTACAGACACC |
| | CAGAACATCTTCTTCATGAGCAAAGTCACCAATCCCAAGCAAGCCTAGAGCTTGCCAT |
| | CAAGCAGTGGGGCTCTCAGTAAGGAACTTGGAATGCAAGCTGGATGCCTGGGTCTCTG |
| | GGCACAGCCTGGCCCCTGTGCACCGAGTGGCCATGGCATGTGTGGCCCTGTCTGCTTA |
| | TCCTTGGAAGGTGACAGCGATTCCCTGTGTAGCTCTCACATGCACAGGGGCCCATGGA |
| | CTCTTCAGTCTGGAGGGTCCTGGGCCTCCTGACAGCAATAAATAATTTCGTTGGAAAA |
| | AAAAAAAAAAAAAAAAAAAAAAAAAAAAAAAAAAAAC |

| | |
|---|---|
| ORF Start: at 2 | ORF Stop: TAG at 1322 |

| | | |
|---|---|---|
| SEQ ID NO: 186 | 440 aa | MW at 49553.3 kD |

| | |
|---|---|
| NOV24e, | TALESTSYTQLPEAELRMERMLPLLALGLLAAGFCPAAAdHPNSPLDEENLTQENQDR |
| CG89285-02 | |
| Protein Sequence | GTHVDLGLASANVDFAFSLYKQLVLKAPDKNVIFSPLSISTALAFLSLGAANTTLTEI |
| | LKGLKFNLTETSEAEIHQSFQHLLRTLNQSSDELQLSMGNAAFVKEQLSLLDRFTEDA |
| | KRLYGSEAFATDFQDSAAAKKLINDYVKNGTRGKITDLIKDLDSQTMMVLAAYIFFKA |
| | KWEMPFDPQDTHQSRFYLSKKKWVMVPMMSLHHLTIPYFRDEELSCTVVELKYTGNAS |
| | ALFILPDQDKMEEVEAMLLPETLKRWRDSLEFREIGELYLPKFSISRDYNLNDILLQL |
| | GIEEAFTSKADLSGITGARNLAVSQVVHKAVLDVFEEGTEASAATAVKITLLSALVET |
| | RTIVRFNRPFLMIIVPTDTQNIFFMSKVTNPKQA |

[0495] Sequence comparison of the above protein sequences yields the following sequence relationships shown in Table 24B.

TABLE 24B
Comparison of NOV24a against NOV24b through NOV24e.

| | | Identities/ |
|---|---|---|
| | | Similarities for |
| Protein | NOV24a Residues/ | the Matched |
| Sequence | Match Residues | Region |
| NOV24b | 1 . . . 423 | 376/423 (88%) |
| | 1 . . . 378 | 377/423 (88%) |
| NOV24c | 1 . . . 216 | 212/216 (98%) |
| | 1 . . . 216 | 213/216 (98%) |
| NOV24d | 1 . . . 216 | 212/216 (98%) |
| | 4 . . . 219 | 214/216 (98%) |
| NOV24e | 1 . . . 423 | 422/423 (99%) |
| | 18 . . . 440 | 423/423 (99%) |

[0496] Further analysis of the NOV24a protein yielded the following properties shown in Table 24C.

TABLE 24C
Protein Sequence Properties NOV24a

| | |
|---|---|
| PSort | 0.4600 probability located in plasma membrane; 0.1000 |
| analysis: | probability located in endoplasmic reticulum (membrane); |
| | 0.1000 probability located in endoplasmic reticulum (lumen); |
| | 0.1000 probability located in outside |
| SignalP | Cleavage site between residues 24 and 25 |
| analysis: | |

[0497] A search of the NOV24a protein against the Geneseq database, a proprietary database that contains sequences published in patents and patent publication, yielded several homologous proteins shown in Table 24D.

TABLE 24D
Geneseq Results for NOV24a

| | | NOV24a | Identities/ | |
|---|---|---|---|---|
| | | Residues/ | Similarities | |
| Geneseq | Protein/Organism/Length | Match | for the | Expect |
| Identifier | [Patent #, Date] | Residues | Matched Region | Value |
| ABB44601 | Human wound healing related | 1 . . . 423 | 421/423 (99%) | 0.0 |
| | polypeptide SEQ ID NO 60 - | 1 . . . 423 | 422/423 (99%) | |
| | Homo sapiens, 423 aa. | | | |
| | [CA2325226-A1, 17 MAY 2001] | | | |
| AAR67259 | Alpha-1-antichymotrypsin - | 22 . . . 423 | 401/402 (99%) | 0.0 |
| | Homo sapiens, 402 aa. | 1 . . . 402 | 402/402 (99%) | |
| | [US5367064-A, 22 NOV. 1994] | | | |
| AAR82250 | Mature human wild type alpha- | 22 . . . 423 | 401/402 (99%) | 0.0 |
| | 1-antichymotrypsin - Homo | 1 . . . 402 | 402/402 (99%) | |
| | sapiens, 476 aa. [WO9527055- | | | |
| | A, 12 OCT. 1995] | | | |
| AAR83101 | Wild-type alpha-1- | 22 . . . 423 | 401/402 (99%) | 0.0 |
| | antichymotrypsin - Homo | 1 . . . 402 | 402/402 (99%) | |
| | sapiens, 402 aa. [WO9527053- | | | |
| | A1, 12 OCT. 1995] | | | |
| AAR44435 | Alpha-antichymotrypsin - Homo | 22 . . . 423 | 401/402 (99%) | 0.0 |
| | sapiens, 402 aa. [US5266465- | 1 . . . 402 | 402/402 (99%) | |
| | A, 30 NOV. 1993] | | | |

[0498] In a BLAST search of public sequence datbases, the NOV24a protein was found to have homology to the proteins shown in the BLASTP data in Table 24E.

TABLE 24E
Public BLASTP Results for NOV24a

| | | | Identities/ | |
|---|---|---|---|---|
| | | NOV24a | Similarities | |
| Protein | | Residues/ | for the | |
| Accession | | Match | Matched | Expect |
| Number | Protein/Organism/Length | Residues | Portion | Value |
| P01011 | Alpha-1-antichymotrypsin | 1 . . . 423 | 422/423 (99%) | 0.0 |
| | precursor (ACT) - Homo | 1 . . . 423 | 423/423 (99%) | |
| | sapiens (Human), 423 aa. | | | |
| AAH34554 | Serine (or cysteine) | 1 . . . 423 | 421/423 (99%) | 0.0 |
| | proteinase inhibitor, clade A | 1 . . . 423 | 423/423 (99%) | |
| | (alpha-1 antiproteinase, | | | |
| | antitrypsin), member 3 - Homo | | | |
| | sapiens (Human), 423 aa. | | | |
| ITHUC | alpha-1-antichymotrypsin | 1 . . . 422 | 415/422 (98%) | 0.0 |
| | precursor - human, 433 aa. | 1 . . . 422 | 417/422 (98%) | |
| Q9UNU9 | Alpha-1-antichymotrypsin - | 17 . . . 423 | 406/407 (99%) | 0.0 |
| | Homo sapiens (Human), 407 aa | 1 . . . 407 | 407/407 (99%) | |
| | (fragment). | | | |
| Q91WP6 | Serine protease inhibitor 2-2 - | 7 . . . 421 | 260/416 (62%) | e−144 |
| | Mus musculus (Mouse), 418 | 4 . . . 418 | 324/416 (77%) | |
| | aa. | | | |

[0499] PFam analysis predicts that the NOV24a protein contains the domains shown in the Table 24F.

TABLE 24F
Domain Analysis of NOV24a

| | | Identities/ | |
|---|---|---|---|
| | | Similarities for | |
| Pfam | NOV24a | the Matched | Expect |
| Domain | Match Region | Region | Value |
| serpin | 46 . . . 420 | 224/394 (57%) | 1.8e−216 |
| | | 345/394 (88%) | |

[0500] Example 25

[0501] The NOV25 clone was analyzed, and the nucleotide and encoded polypeptide sequences are shown in Table 25A.

TABLE 25A
NOV25 Sequence Analysis

| | |
|---|---|
| SEQ ID NO: 187 | 1860 bp |

| | |
|---|---|
| NOV25a, | GCGGATCCTCACACGACTGTGATCCGATTCTTTCCAGCGGCTTCTGCAACCAAGCGGGTCTTACCCCC |
| CG57094-01 | |
| DNA Sequence | GGTCCTCCGCGTCTCCAGTCCTCGCACCTGGAACCCCAACGTCCCCGAGAGTCCCCGAATCCCCGCTC |
| | CCAGGCTACCTAAGAGGATGAGCGGTGCTCCGACAACCAAGGAAGCCCTGATGCTCTGCGCCGCAACC |
| | GCCGTGCTACTGAGCGCTCAGGGCGGACCCGTGCAGTCCAAGTCGCCGCGCTTTGCGTCCTGGGACGA |
| | GATGAATGTCCTGGCGCACGGACTCCTGCAGCTCGGCCAGGAATGCGCGAACACCAAAGCGAACCCGC |
| | AGTCAGCTGAGCGCGCTGGAGCGCGCCTGAGCCCGTGCGGGTCCGCCTGTAAGGGAACCGAGGAATCC |
| | ACCGACCTCCCGTTAGCCCCTGAGAGCCGGGTGGACCCTGAGGTCCTTCACAGCCTGCAGACACAACT |
| | CAAGGCTCAGAACAGCAGGATCCAGCAACTCTTCCACAAGGTGGCCCAGCAGCAGCGGCACCTGGAGA |
| | AGCAGCACCTGCGAATTCAGCATCTGCAAAGCCAGTTTGGCCTCCTGGACCACAAGCACCTAGACCAT |
| | GAGGTGGCCAAGCCTGCCCGAAGAAAGAGGCTGCCCGAGATGGCCCAGCAAGTTGACCCGGCTAACAA |
| | TGTCAGCCGCCTGCACCGGCTGCCCAGGGATTGCCAGGAGCTGTTCAAGGTTAAAAAGAGGAAGAGTG |
| | GACTATTTGAAATCCAGCCTCAGGGGTCTCCGCCATTTTTGGTGAACTGCAAGATGACCTAAGATGGA |
| | GGCTGGACAGTAATTCAGAGGCGCCACGATGGCTCAGTGGACTTCAACCGGCCCTGGGAAGCCTACAA |
| | GGCGGGGTTTGGGGATCCCCACGGCGAGTTCTGGCTGGGTCTGGAGAAGGTGCATAGCATCACGGGGG |
| | ACCGCAACAGCCGCCTGGCCGTGCAGCTGCGGGACTGGGATGGCAACGCCGAGTTGCTGCAGTTCTCC |
| | GTGCACCTGGGTGGCGAGGACACGGCCTATAGCCTGCAGCTCACTGCACCCGTGGCCGGCCAGCTGGG |
| | CCCCACCACCGTCCCACCCAGCGGCCTCTCCGTACCCTTCTCCACTTGGGACAAAAATAACGACCTCC |
| | GCAGGGACAAGAACTGCGCCAAGAGCCTCTCTGGAGGCTGGTGGTTTGGCACCTGAAGCCATTCCAAC |
| | CTCAACGGCCAGTACTTCCGCTCCATCCCACAGCAGCGGCAGAAGCTTAAGAAGGGAATCTTCTGGAA |
| | GACCTGGCGGGGCCGCTACTACCCGCTGCAGGCCACCACCATGTTGATCCAGCCCATGGCAGCAGAGG |
| | CAGCCTCCTAGCGTCCTGGCTGGGCCTGGTCCCAGGCCCACGAAAGACGGTGACTCTTAACTCTGCCC |
| | GAGGATGTGGCCAAGACCACGACTGGAGAAGCCCCCTTTCTGAGTGAAGGGGGGCTGAATGCGTTGCC |
| | TCCTGAGATCGAGGCTGCAGGATATGCTCAGACTCTAGAGGCGTGGACCAAGGGGCATGGAGCTTCAC |
| | TCCTTGCTGGCCAGGGAGTTGGGGACTCAGAGGGACCACTTGGGGCCAGCCAGACTGGCCTCAATGGC |
| | GGACTCAGTCACATTGACTGACGGGACCAGGGCTTGTGTGGAATCGAGAGCGCCCTAATGGTCCTGGT |
| | GCTGTTGTGTGTAGGTCCCCTGGGACACAAGCAGGCGCCAATGGTATCTGGGCGGAAACTCACAGAGT |
| | TCTTGGAATAAAAGCAACCTCAGAACAAAAAAAAAAAAAAAAAAGCGGAGCTCACAGAGTTCTTGGAA |
| | TAAAAGCAACCTCAGAACAAAAAA |

| | |
|---|---|
| ORF Start: ATG at 154 | ORF Stop: TAG at 1369 |

| | | |
|---|---|---|
| SEQ ID NO: 188 | 405 aa | MW at 44702.1 kD |

| | |
|---|---|
| NOV25a, | MSGAPTAGAALMLCAATAVLLSAQGGPVQSKSPRFASWDEMNVLAHGLLQLGQGCANTGAHPQSAERA |
| CG57094-01 | |
| Protein | GARLSACGSACQGTEGSTDLPLAPESRVDPEVLHSLQTQLKAQNSRIQQLFHKVAQQQRHLEKQHLRI |
| Sequence | |
| | QHLQSQFGLLDHKHLDHEVAKPARRKRLPEMAQPAAPAAAASRLHRLPRDCQELFQVGERQSGLFEIQ |
| | PQGSPPFLVNCKMTSDGGWTVIQRRHDGSVDFNRPWAAYAAGFGDPHGEFWLGLEAAHSITGDRNSRL |
| | AVQLRDWDGNAELLQFSVHLGGEDTAYSLQLTAPVAGQLGATTVPPSGLSVPFSTWDQDHDLRRDKNC |
| | AKSLSGGWWFGTCSHSNLNGQYFRSIPQQRQKLKKGIFWKTWRGRYYPLQATTMLIQPAAEAAS |

| | |
|---|---|
| SEQ ID NO: 189 | 1155 bp |

| | |
|---|---|
| NOV25b, | AGATCTGGACCCGTGCAGTCCAAGTCGCCGCGCTTTGCGTCCTGAAACAAGATGAATGTCCTGGCGC |
| 17007596 | |
| DNA Sequence | ACGGACTCCTGCAGCTCGGCCAGGGGCTGCGCGAACACGCAAAGCGCACCCGAAGTAAGCTGAGCGC |
| | GCTGGAGCGGCGCCTGAGCGCGTGCGGGTCCGCCTGTCAGGGAACCGAGGGGTCCACCGACCTCCCG |
| | TTAGCCCCTGAGAGCCGGGTGGACCCTGAGGTCCTTCACAGCCTGCAGACACAACTCAAGGCTCAGA |
| | ACAGCAGGATCCAGCAACTCTTCCACAAGGTGGCCCAGCAGCAGCGGCACCTGGAGAAGCAGCACCT |
| | GCGAATTCAGCATCTGCAAAGCCAGTTTGGCCTCCTGGACCACAAGCACCTAGACAATGAGGTGGCC |
| | AAGCCTGCCCGAAGAAAGAGGCTGCCCGAGATGGCCCAGCCAGTTGACCCCGGCTAAAATGTCAGCC |
| | GCCTGCACCCGCTGCCCAGGGATTGCCAGGACCTGTTCCAGGTTAAGGAGAGGAAGAGTGGACTATT |
| | TGAAATCCAGCCTCAGGGGTCTCCGCCATTTTTGGTGAACTGCAAGATGACCTCAGATGGAGGCTGG |
| | ACAGTAATTCAGAGGCGCCACGATGGCTCAGTGGACTTCAACCGGCCCTGGGAAGCCTACAAGGCGG |
| | GGTTTGGGGATCCCCACGGCGAGTTCTGGCTAAGTCTGGAGGAGGTGAATAGAATAACGGGGGACCG |
| | CAACAGCCGCCTGGCCGTGCAGCTGCGGGACTGGGATGGCAACGCCGAGTTGCTGAAQTTCTCCGTG |
| | CACCTGGGTGGCGAGGACACCGCCTATAGCCTGCAGCTCACTGCACCCGTGGCCGGCCAGCTGGGCG |
| | CCACCACCGTCCCACCCAGCGGCCTCTCCGTACCCTTCTGGACTTGGGACCAGGATCACGACCTCCG |
| | CAGGGACAAGAACTGCGCCAAGAGCCTCTCTQGAGGCTGGTGGTTTGGAACCTGCAGCAATTCAAAC |
| | CTCAACGGCCAGTACTTCCGCTCCATCCCACAGCAGCGGCAGAAGCTTAAGAAGGGAATCTTCTGGA |
| | AGACCTGGCGGGGCCGCTACTACCCGCTGCAGGCCACCACCATGTTGATCCAGCCCATGGCAGCAGA |
| | GGCAGCCTCCCTCGAG |

| | |
|---|---|
| ORF Start: at 1 | ORF Stop: end of sequence |

| | | |
|---|---|---|
| SEQ ID NO: 190 | 385 aa | MW at 43441.5 kD |

| | |
|---|---|
| NOV25b, | RSGPVQSKSPRFASWDEMNVLAHGLLQLCGGLREHAERTRSQLSALERRLSACGSACQGTEGSTDLP |
| 170075926 | |
| Protein | LAPESRVDPEVLHSLQTQLKAQNSRIQQLFHKVAQQQRHLEKQHLRIQHLQSQFGLLDHKHLDHEVA |
| | KPARRKRLPEMAQPVDPAHNVSRLHRLPRDCQELFQVGERQSGLFEIQPQGSPPFLVNCKMTSDGGW |
| | TVIQRRHDGSVDFNRPWEAYKAGFGDPHGEFWLGLEEVHSITGDRNSRLAVQLRDWDGNAELLQFSV |
| | HLGGEDTAYSLQLTAPVAGQLGATTVPPSGLSVPFSTWDQDHDLRRDKNCAKSLSGGWWFGTCSHSN |
| | LNGQYFRSIPQQRQKLKKGIFWKTWRGRYYPLQATTMLIQPMAAEAASLE |

| | |
|---|---|
| SEQ ID NO: 191 | 1155 bp |

| | |
|---|---|
| NOV25c, | AGATCTGGACCCGTGCAGTCCAAGTCGCCGCGCTTTGCGTCCTGGGACGAGATGAATGTCCTGGCGCA |
| 164225601 | |
| DNA Sequence | CGGACTCCTGCAGCTCGGCCAGGGGCTGCGCGAACACGCGGAGCGCACCCGCAGTCAGCTGAGCGCGC |
| | TGGAGCGGCGCCTGAGCGCGTGCGGGTCCGCCTGTCAGGGAACCGAGGGGTCCACCGACCTCCCGTTA |
| | GCCCCTGAGAGCCGGGTGGACCCTGAGGTCCTTCACAGCCTGCAGACACAACTCAAGGCTCAGAACAG |
| | TTCAGCATCTGCAAAGCCAGTTTGGCCTCCTGGACCACAAGCACCTAGACCATGAGGTGGCCAAGCCT |
| | GCCCGAAGAAAGAGGCTGCCCGAGATGGCCCAGCCAGTTGACCCGGCTCACAATGTCAGCCGCCTGCA |
| | CCGGCTGCCCAGGGATTGCCAGGAGCTGTTCCAGGTTGGGGAGAGGCAGAGTGGACTATTTGAAATCC |
| | AGCCTCAGGGGTCTCCGCCATTTTTGGTGAACTGCAAGATGACCTCAGATGGAGGCTGGACAGTAATT |
| | CAGAGGCGCCACGATGGCTCAGTGGACTTCAACCGGCCCTGGGAAGCCTACAAGGCGGGGTTTGGGGA |
| | TCCCCACGGCGAGTTCTGGCTGGGTCTGGAGAAGGTGCATAGCATCACGGGGGACCGCAACAGCCGCC |
| | TGGCCGTGCAGCTGCGGGACTGGGATGGCAACGCCGAGTTGCTGCAGTTCTCCGTGCACCTGGGTGGC |
| | GAGGACACGGCCTATAGCCTGCAGCTCACTGCACCCGTGGCCGGCCAGCTGGGCGCCACCACCGTCCC |
| | ACCCAGCGGCCTCTCCGTACCCTTCTCCACTTGGGACCAGGATCACGACCTCCGCAGGGACAAGAACT |
| | GCGCCAAGAGCCTCTCTGGAGGCTGGTGGTTTGGCACCTGCAGCCATTCCAACCTCAACGGCCAGTAC |
| | TTCCGCTCCATCCCACAGCAGCGGCAGAAGCTTAAGAAGGGAATCTTCTGGAAGACCTGGCGGGGCCG |
| | CTACTACCCGCTGCAGGCCACCACCATGTTGATCCAGCCCATGGCAGCAGAGGCAGCCTCCCTCGAG |

| | |
|---|---|
| ORF Start: at 1 | ORF Stop: end of sequence |

| | | |
|---|---|---|
| SEQ ID NO: 192 | 385 aa | MW at 43440.6 kD |

| | |
|---|---|
| NOV25c, | RSGPVQSKSPRFASWDEMNVLAHGLLQLGQGLREHAERTRSQLSALERRLSACGSACQGTEGSTDLPL |
| 164225601 | |
| Protein | APESRVDPEVLHSLQTQLKAQNSRIQQLFHKVAQQQRHLEKQHLRIQHLQSQFGLLDHKHLDHEVAKP |
| Sequence | |
| | ARRKRLPEMAQPVDPAHNVSRLHRLPRDCQELFQVGERQSGLFEIQPQGSPPFLVNCKMTSDGGWTVI |
| | QRRHDGSVDFNRPWEAYKAGFGDPHGEFWLGLEKVHSITGDRNSRLAVQLRDWDGNAELLQFSVHLGG |
| | EDTAYSLQLTAPVAGQLGATTVPPSGLSVPFSTWDQDHDLRRDKNCAKSLSGGWWFGTCSHSNLNGQY |
| | FRSIPQQRQKLKKGIFWKTWRGRYYPLQATTMLIQPMAAEAASLE |

| | |
|---|---|
| SEQ ID NO: 193 | 1155 bp |

| | |
|---|---|
| NOV25d, | AGATCTGGACCCGTGCAGTCGAGTCGCCGCGCTTTGCGTCCTGGGACCAAATGAATGTCCTGGCAAC |
| 164225637 | |
| DNA Sequence | ACGGACTCCTGCAGCTCGGCCAGGGGCTGCGCGAACACGCGGAGCGCACCCGCAGTCAGCTGAGCGC |
| | GCTGGAGCGGCGCCTGAGCGCGTGCGGGTCCGCCTGTCAGGGAACCGAGGGGTCCACCGACCTCCCG |
| | TTAGCCCCTGAGAGCCGGGTGGACCCTGAGGTCCTTCACAGCCTGCAGACACAACTCAAGGCTCAGA |
| | ACAGCAGGATCCAGCAACTCTTCCACAAGGTGGCCCAGCAGCAGCGGCACCTGGAGAAGCAGCACCT |
| | GCGAATTCAGCATCTGCAAAGCCAGTTTGGCCTCCTGGACCACAAGCACCTAGACCATGAGGTGGCC |
| | AAGCCTGCCCGAAGAAAGAGGCTGCCCGAGATGGCCCAGCCAGTTGACCCGGCTCACAATGTCAGCC |
| | GCCTGCACCGGCTGCCCAGGGATTGCCAGGAGCTGTTCCAGGTTGGGGAGAGGCAGAGTGGACTATT |
| | TGAAATCCAGCCTCAGGGGTCTCCGCCATTTTTGGTGAACTGCAAGATGACCTCAGATGGAGGCTGG |
| | ACAGTAATTCAGAGGCGCCACGATGGCTCAGTGGACTTCAACCGGCCCTGGGAAGCCTACAAGGCGG |
| | GGTTTGGGGATCCCCACGGCGAGTTCTGGCTGGGTCTGGAGAAGGTGCATAGCATCACGGGGGACCG |
| | CAACAGCCGCCTGGCCGTGCAGCTGCGGGACTGGGATGGCAACGCCGAGTTGCTGCAGTTCTCCGTG |
| | CACCTGGGTGGCGAGGACACGGCCTATAGCCTGCAGCTCACTGCACCCGTGGCCGGCCAGCTGGGCG |
| | CCACCACCGTCCCACCCAGCGGCCTCTCCGTACCCTTCTCCACTTGGQACAAAAATAACGACCTCCG |
| | CAGGGACAAGAACTGCGCCAAGAGCCTCTCTGGAGGCTGGTGGTTTGGAACCTGAAGCAATTCAAAC |
| | CTCAACGGCCAGTACTTCCGCTCCATCCCACAGCAGCGGCAGAAGCTTAAGAAGGGAATCTTCTGGA |
| | AGACCTGGCGGCGCCGCCACTACCCGCTGCAGGCCACCACCATGTCGATCCAGCCCATGGCAGCAGA |
| | GGCAGCCTCCCTCGAG |

| | |
|---|---|
| ORF Start: at 1 | ORF Stop: end of sequence |

| | | |
|---|---|---|
| SEQ ID NO: 194 | 385 aa | MW at 43388.5 kD |

| | |
|---|---|
| NOV25d, | RSGPVQSKSPRFASWDEMNVLAHGLLQLGQGLREHAERTRSQLSALERRLSACGSACQGTEGSTDLP |
| 164225637 | |
| Protein | LAPESRVDPEVLHSLQTQLKAQNSRIQQLFHKVAQQQRHLEKQHLRIQHLQSQFGLLDHKHLDHEVA |
| Sequence | |
| | KPARRKRLPEMAQPVDPAHNVSRLHRLPRDCQELFQVGERQSGLFEIQPQGSPPFLVNCKMTSDGGW |
| | TVIQRRHDGSVDFNRPWEAYKAGFGDPHGEFWLGLEKVHSITGDRNSRLAVQLRDWDGNAELLQFSV |
| | HLGGEDTAYSLQLTAPVAGQLGATTVPPSGLSVPFSTWDQDHDLRRDKNCAHSLSGGWWFGTCSHSN |
| | LNGQYFRSIPQQRQKLKKGIFWKTWRGRHYPLQATTMSIQPMAAEAASLE |

| | |
|---|---|
| SEQ ID NO: 195 | 1155bp |

| | |
|---|---|
| NOV25e, | AGATCTGGACCCGTGCAGTCCAAGTCGCCGCGCTTTGCQTCCTGGGACGAGATGAATGTCCTGGCGCA |
| 170075926 | |
| DNA Sequence | CGGACTCCTGCAGCTCGGCCAGCGGCTGCGCGAACACGCGGACCGCACCCGCAGTCACCTGAGCGCGC |
| | TGGAGCGGCGCCTGAGCGCGTGCGCGTCCGCCTGTCAGGGAACCGAGGGGTCCACCGACCTCCCGTTA |
| | GCCCCTGAGAGCCGGGTGGACCCTGAGGTCCTTCACAGCCTGCAGACACAACTCAAGGCTCAGAACAG |
| | CAGGATCCAGCAACTCTTCCACAAGGTGGCCCAGCAGCAGCGGCACCTGGAGAACCAGCACCTGCGAA |
| | TTCAGCATCTGCAAAGCCAGTTTGGCCTCCTGGACCACAAGCACCTAGACCATGAGGTGGCCAAGCCT |
| | GCCCGAAQAAAGAGGCTGCCCGAGATGGCCCAGCCAGTTGACCCQGCTCACAATGTCAGCCGCCTCCA |
| | CCGGCTGCCCAQGGATTGCCAGCAGCTGTTCCAGGTTGGGGAGAGGCAGAGTGGACTATTTGAAATCC |
| | AGCCTCACGGGTCTCCGCCATTTTTGGTGAACTGCAAGATGACCTCAGATGGAGGCTGGACAGTAATT |
| | CAGACGCCCCACCATGGCTCAGTGGACTTCAACCGGCCCTGGGAAGCCTACAAGGCGGGGTTTGGGGA |
| | TCCCCACGGCGAGTTCTGCCTGGGTCTGGAGGACGTGCATAGCATCACGGGGGACCGCAACAGCCGCC |
| | TGGCCGTGCAGCTGCGGGACTGGGATGCCAACCCCCAGTTCCTLCAGTTCTCCGTGCACCTGGGTGGC |
| | GAGGACACGGCCTATAGCCTGCAGCTCACTGCACCCGTGGCCCGCCAGCTGGGCGCCACCACCGTCCC |
| | ACCCAGCQCCCTCTCCGTACCCTTCTCCACTTGGGACCACGATCACGACCTCCGCAGGGACAAGAACT |
| | GCGCCAAGAGCCTCTCTGGAQGCTGGTGGTTTGGCACCTGCAGCCATTCCAACCTCAACGGCCAGTAC |
| | TTCCGCTCCATCCCACAGCAGCGGCAGAAGCTTAAGAACGGAATCTTCTGGAAGACCTGGCGGGGCCG |
| | CTACTACCCGCTGCAGGCCACCACCATGTTGATCCAGCCCATGGCAGCAGAGGCAGCCTCCCTCGAG |

| | |
|---|---|
| ORF Start: at 1 | ORF Stop: end of sequence |

| | | |
|---|---|---|
| SEQ ID NO: 196 | 385 aa | MW at 43441.5 kD |

| | |
|---|---|
| NOV25e, | RSGPVQSKSPRFASWDEMNVLAHGLLQLGQGLREHAERTRSQLSALERRLSACGSACQGTEGSTDLPL |
| 170075926 | |
| Protein | APESRVDPEVLHSLQTQLKAQNSRIQQLPHKVAQQQRHLEKQHLRIQHLQSQFGLLDHKHLDHEVAKP |
| Sequence | |
| | ARRKRLPEMAQPVDPAHNVSRLHRLPRDCQELFQVGERQSGLPEIQPQGSPPFLVNCKMTSDGGWTVI |
| | QRRHDGSVDFNRPWEAYKAGFGDPHGEFWLGLEEVHSITGDRNSRLAVQLRDWDGNAELLQFSVHLGG |
| | EDTAYSLQLTAPVAGQLGATTVPPSGLSVPFSTWDQDHDLRRDKNCAKSLSQGWWAAGTCSHSNLNGQY |
| | FRSIPQQRQKLKKGIFWKTWRGRYYPLQATTMLIQPMAAEAASLE |

| | |
|---|---|
| SEQ ID NO: 197 | 1239 bp |

| | |
|---|---|
| NOV25f, | GACGTTAACATGAGCGGTGCTCCGACCGCCGGGGCAGCCCTGATCCTCTGCGCCGCCACCQCCGTGCT |
| 254120574 | |
| DNA Sequence | ACTGAGCGCTCAGGGCGGACCCGTGCAGTCCAAGTCGCCGCGCTTTGCGTCCTGGGACGAGATGAATG |
| | TCCTGGCGCACGGACTCCTGCAGCTCGGCCAGGGGCTGCGCGAACACGCGGAGCGCACCCGCAGTCAG |
| | CTGAGCGCGCTGGAGCGGCGCCTCAGCGCGTCCCGGTCCGCCTGTCAGGGAACCGAGGGGTCCACCGA |
| | CCTCCCGTTAGCCCCTGAGAGCCGGGTGGACCCTGAGGTCCTTCACAGCCTGCAGACACAACTCAAGG |
| | CTCAGAACAGCAGGATCCAGCAACTCTTCCACAAGGTGGCCCAGCAGCAGCGGCACCTGGAGAAGCAG |
| | CACCTGCGAATTCAGCATCTGCAAAGCCAGTTTGGCCTCCTGGACCACAAGCACCTAGACCATGAGGT |
| | GGCCAAGCCTGCCCGAAGAAAGAGGCTGCCCGAGATGGCCCACCCAGTTGACCCGGCTCACAATGTCA |
| | GCCGCCTGCACCGGCTGCCCAGGGATTGCCAGGAGCTGTTCCAGGTTGGGGAGAGGCAGAGTGGACTA |
| | TTTGAAATCCAGCCTCACGGGTCTCCGCCATTTTTGGTGAACTGCAAGATGACCTCAGATGGAGGCTG |
| | GACAGTAATTCAGAGGCGCCACGATGGCTCAGTGGACTTCAACCGGCCCTGGGAAGCCTACAAGGCGG |
| | GGTTTGGGGATCCCCACGGCGAGTTCTCGCTGGGTCTCGACAAGGTGCATAGCATCACGGGGGACCGC |
| | AACAGCCGCCTGGCCGTGCAGCTGCGGGACTGGGATGGCAACGCCGAGTTGCTGCAGTTCTCCGTGCA |
| | CCTGGGTGGCGAGGACACGGCCTATAGCCTGCAGCTCACTGCACCCGTGGCCGGCCAGCTGGGCGCCA |
| | CCACCGTCCCACCCAGCGGCCTCTCCGTACCCTTCTCCACTTGGGACCAGGATCACGACCTCCGCACC |
| | GACAAGAACTGCGCCAAGAGCCTCTCTGGAGGCTGGTGGTTTGGCACCTGCAGCCATTCCAACCTCAA |
| | CGGCCAGTACTTCCGCTCCATCCCACAGCAGCGGCAGAAGCTTAAGAAGGGAATCTTCTGGAAGACCT |
| | GGCGGGGCCGCTACTACCCGCTGCAGGCCACCACCATGTTGATCCAGCCCATGGCAGCAGAGGCAGCC |
| | TCCTAGATCAAATGGG |

| | |
|---|---|
| ORF start: at 1 | ORF Stop: TAG at 1228 |

| | | |
|---|---|---|
| SEQ ID NO: 198 | 409 aa | MW at 45542.0 kD |

| | |
|---|---|
| NOV25f, | DVNMSGAPTAGAALMLCAATAVLLSAQGGPVQSKSPRFASWDEMNVLAHGLLQLGGGLREHAERTRSQ |
| 254120574 | |
| Protein | LSALERRLSACGSACGGTEGSTDLPLAPESRVDPEVLHSLQTGLKAQNSRIQQLFHKVAQQQRHLEKQ |
| Sequence | |
| | HLRIQHLQSQFGLLDHKHLDHEVAKPARRKRLPEMAQPVDPAHNVSRLHRLPRDCGELFQVGERQSGL |
| | FEIQPQGSPPFLVNCKMTSDGGWTVIQRRHDGSVDFNRPWEAYKAGFGDPHGEFWLGLEKVHSITGDR |
| | NSRLAVQLRDWDGNAELLQFSVHLGGEDTAYSLQLTAPVACGLGATTVPPSGLSVPFSTWDQDHDLRR |
| | DKNCAKSLSGGWWFGTCSHSNLNGGYFRSIPQQRQKLKKGIFWKTWRGRYYPLQATTNLIQPMAAEAA |
| | S |

| | |
|---|---|
| SEQ ID NO: 199 | 1233 bp |

| | |
|---|---|
| NOV25g, | AGATCTACCATGAGCGGTGCTCCGACGGCCGGGGCAGCCCTGATGCTCTGCGCCGCCACCGCCGTGC |
| 254156650 | |
| DNA Sequence | TACTGAGCGCTCAGGGCGGACCCGTGCAGTCCAAGTCGCCGCGCTTTGCGTCCTGGGACGAGATGAA |
| | TGTCCTGGCGCACGGACTCCTGCAGCTCGGCCAQGGGCTGCGCGAACACGCGGACCGCACCCGCAGT |
| | CAGCTGAGCGCGCTGGAGCGGCGCCTGAGCGCGTGCGGGTCCGCCTGTCAGGGAACCGAGGGGTCCA |
| | CCGACCTCCCGTTAGCCCCTGAGAGCCGGGTGGACCCTGAGGTCCTTCACAGCCTCCAGACACAACT |
| | CAAGGCTCAGAACAGCAGGATCCAGCAACTCTTCCACAAGGTGGCCCAGCAGCAGCGGCACCTGGAG |
| | AAGCAGCACCTGCGAATTCAGCATCTGCAAAGCCAGTTTGGCCTCCTGGACCACAAGCACCTAGACC |
| | ATGAGGTGGCCAAGCCTGCCCGAAGAAAGAGGCTGCCCGAGATGGCCCAGCCAGTTGACCCGGCTCA |
| | CAATGTCAGCCGCCTGCACCGGCTGCCCAGGCATTGCCAGGAGCTGTTCCAGGTTGGGGAGAGGCAG |
| | AGTGGACTATTTGAAATCCAGCCTCAGGGGTCTCCGCCATTTTTGGTGAACTGCAAGATGACCTCAG |
| | ATGGAGGCTGGACAGTAATTCAGAGGCGCCACGATGGCTCAGTGGACTTCAACCGGCCCTGGGAAGC |
| | CTACAAGGCGGGGTTTGGGGATCCCCACGGCGAGTTCTGGCTGGGTCTGGAGAAGGTGCATAGCATC |
| | ACGGGGGACCGCAACAGCCGCCTGGCCGTGCAGCTGCGGGACTGGGATGGCAACGCCGAGTTGCTGC |
| | AGTTCTCCGTGCACCTGGGTGGCGAGGACACGGCCTATAGCCTGCAGCTCACTGCACCCGTGGCCGG |
| | CCAGCTGGGCGCCACCACCGTCCCACCCAGCGGCCTCTCCGTACCCTTCTCCACTTGGGACCAGGAT |
| | CACGACCTCCGCAGGGACAAGAACTGCGCCAAGACCCTCTCTGGAGGCTGGTGGTTTGGCACCTGCA |
| | GCCATTCCAACCTCAACGGCCAGTACTTCCGCTCCATCCCACAGCAGCCGCAGAAGCTTAAGAAGGG |
| | AATCTTCTGGAAGACCTGGCGGCGCCGCTACTACCCGCTGCACGCCACCACCATGTTGATCCAGCCC |
| | ATGGCAGCAGAGGCAGCCTCCCTCGAG |

| | |
|---|---|
| ORF Start: at 1 | ORF Stop: end of sequence |

| | | |
|---|---|---|
| SEQ ID NO: 200 | 411 aa | MW at 45800.3 kD |

| | |
|---|---|
| NOV25g, | RSTMSGAPTAGAALMLCAATAVLLSAQGGPVQSKSPRFASWDEMNVLAHGLLQLGGGLREHAERTRS |
| 254156650 | |
| Protein | QLSALERRLSACGSACGGTEGSTDLPLAPESRVDPEVLHSLQTGLKAQNSRIQQLFHKVAQQQRHLE |
| Sequence | |
| | KQHLRIQHLQSQFGLLDHKHLDHEVAKPARRKRLPEMAQPVDPAHNVSRLHRLPRDCGELFQVGERQ |
| | SGLFEIQPQGSPPFLVNCKMTSDGGWTVIQRRHDGSVDFNRPWEAYKAGFGDPHGEFWLGLEKVHST |
| | TGDRNSRLAVQLRDWDGNAELLQFSVHLGGEDTAYSLQLTAPVAGGLGATTVPPSGLSVPFSTWDQD |
| | HDLRRDKNCAKSLSGGWWFGTCSHSNLNGGYFRSIPQQRQKLKKGIFWKTWRGRYYPLQATTMLIQP |
| | MAAEAASLE |

| | |
|---|---|
| SEQ ID NO: 201 | 1239 bp |

| | |
|---|---|
| NOV25h, | TCATCCCGGGATGAGCGGTGCTCCGACGGCCGGGGCAGCCCTGATGCTCTGCGCCGCCACCGCCGTG |
| 254500366 | |
| DNA Sequence | CTACTGAGCCCTCAGGGCGGACCCGTGCAATCCAAGTCGCCGCGCTTTGCGTCCTGGGACCAGATGA |
| | ATGTCCTGGCGCACGCACTCCTGC1GCTCGGCAAGGGGCTGCGCGAACACGCGGAGCGCACCCGCAG |
| | TCAGCTGAGCGCGCTGGAGCGGCGCCTGAGCGCGTGCGGGTCCGCCTGTCAGGCAACCGACGGGTCC |
| | ACCGACCTCCCGTTAGCCCCTGACAGCCGCGTGGACCCTGAGGTCCTTCACAGCCTGCAGACACAAC |
| | TCAAGGCTCAGAACAGCAGGATCCAaCAACTCTTCCACAACGTGGCCCAGCAGCAGCGGCACCTCGA |
| | GAAGCAGCACCTGCGAATTCAGCATCTGCAAAGCCAGTTTGGCCTCCTGGACCACAAGCACCTAGAC |
| | CATGAGGTGGCCAAGCCTGCCCGAAGAAAGAGGCTGCCCGAGATGGCCCAGCCAGTTGACCCCGCTC |
| | ACAATGTCAGCCGCCTGCACCGGCTGCCCAGCGATTGCCAGGAGCTGTTCCAGGTTGGGGAGAGGCA |
| | GAGTGGACTATTTGAAATCCACCCTCAGGGGTCTCCGCCATTTTTGGTGAACTGCAAGATGACCTCA |
| | GATGGAGGCTGGACAGTAATTCAGAGGCGCCACGATGGCTCACTCGACTTCAACCGGCCCTGGGAAG |
| | CCTACAAGGCCGGGTTTGGGGATCCCCACGGCGAGTTCTGGCTGGGTCTCGAGAAGGTGCATAGCAT |
| | CACGGGGGACCGCAACAGCCGCCTGGCCGTGCAGCTGCGCGACTGGGATGGCAACGCCGAGTTGCTG |
| | CAGTTCTCCGTGCACCTGGGTGGCGAGGACACGGCCTATAGCCTGCAGCTCACTGCACCCGTGGCCG |
| | GCCAGCTGGGCGCCACCACCGTCCCACCCAGCGGCCTCTCCGTACCCTTCTCCACTTGGGACCAGGA |
| | TCACCACCTCCGCAGGGACAAGAACTGCGCCAAGAGCCTCTCTGGAGGCTCGTGGTTTGGCACCTGC |
| | AGCCATTCCAACCTCAACGGCCAGTACTTCCGCTCCATCCCACAGCAGCGGCAGAAGCTTAAGAAGG |
| | GAATCTTCTGGAAGACCTGGCGGCGCCGCTACTACCCGCTGCAGGCCACCACCATGTTGATCCAGCC |
| | CATGGCAGCAGACGCAGCCTCCCGTCCACGCGT |

| | |
|---|---|
| ORF Start: at 2 | ORF Stop: end of sequence |

| | | |
|---|---|---|
| SEQ ID NO: 202 | 413 aa | MW at 45973.6 kD |

| | |
|---|---|
| NOV25h, | HPGMSGAPTAGAALMLCAATAVLLSAQGGPVQSKSPRFASWDEMNVLAHGLLQLGQGLREHAERTRS |
| 254500366 | |
| Protein | QLSALERRLSACGSACGGTEGSTDLPLAPESRVDPEVLHSLQTGLAAGNSRIQQLFHKVAQQQRHLE |
| Sequence | |
| | KQHLRIQHLQSQFGLLDHKHLDHEVAKPARRKRLPEMAQPVDPAHNVSRLHRLPRDCGELFQVGERQ |
| | SGLFEIQPQGSPPFLVNCKMTSDGGWTVIQRRHDGSVDFNRPWEAYKAGFGDPHGEFWLGLEKVHSI |
| | HDLRRDKNCAKSLSGGWWFGTCSHSNLNCGYFRSIPQQRQKLKKGIFWKTWRGRYYPLQATTMLIQP |
| | MAAEAASRRRX |

| | |
|---|---|
| SEQ ID NO: 203 | 1167 bp |

| | |
|---|---|
| NOV25i, | GACGTTAACATGGGACCCGTGCAGTCCAAGTCGCCGCGCTTTGCGTCCTGAAACGAAATGAATGTCCT |
| 226679956 | |
| DNA Sequence | GGCGCACGGACTCCTGCAGCTCGGCCAGGGGCTGCGCGAACACGCGGAGCGCACCCGCAGTCAGCTGA |
| | GCGCGCTGGAGCGGCGCCTGAGCGCGTGCGGGTCCGCCTGTAAGGGAACCGAGAAGTCAACCGACCTC |
| | CCGTTAGCCCCTGAGAGCCGGGTGGACCCTGAGGTCCTTCACAGCCTGCAGACACAACTCAAGGCTCA |
| | GAACAGCAGGATCCAGCAACTCTTCCACAAGGTGGCCCAGCAGCAGCGGCACCTGGAGAAGCAGCACC |
| | TGCGAATTCAGCATCTGCAAAGCCAGTTTCGCCTCCTGCACCACAAGAACCTAGACAATGAGGTGCCC |
| | AAGCCTGCCCGAAGAAAGAGGCTGCCCGAGATGGCCCAGCCAGTTGACCCGGCTCACAATGTCAGCCG |
| | CCTGCACCGGCTGCCCAGGGATTGCCAGGAGCTGTTCCAGGTTGGGGAGAGGCAGAGTGGACTATTTG |
| | AAATCCAGCCTCAGGGGTCTCCGCCATTTTTGGTGAACTGCAAGATGACCTCAGATGGAGGCTGGACA |
| | GTAATTCAGAGGCGCCACGATGGCTCAGTGGACTTCAACCGGCCCTGGGAAGCCTACAAGGCGGGGTT |
| | TGGGGATCCCCACGGCGAGTTCTGGCTGGGTCTGGAGAAGGTGCATAGCATCACGGGGGACCGCAACA |
| | GCCGCCTGGCCGTGCAGCTGCGGGACTGGAATGGCAACGCCGAGTTGCTGAAGTTCTCCGTGCACCTG |
| | GGTGGCGAGGACACGGCCTATAGCCTGCAGCTCACTGCACCCGTGGCCGGCCAGCTGGGCGCCACCAC |
| | CGTCCCACCCAGCGGCCTCTCCGTACCCTTCTCCACTTGGGACCAAAATCACGACCTCCAAACGGAAA |
| | AGAACTGCGCCAAGAGCCTCTCTGGAGGCTGGTGGTTTGGCACCTGCAGCCATTCCAACCTCAACGGC |
| | CAGTACTTCCGCTCCATCCCACAGCAGCGGCAGAAGCTTAAGAAGGGAATCTTCTGGAAGACCTGGCG |
| | GGGCCGCTACTACCCGCTGCAGGCCACCACCATGTTGATCCAGCCCATGGCAGCAGAGGCAGCCTCCT |
| | AGATCGATGGG |

| | |
|---|---|
| ORF Start: at 1 | ORF Stop: TAG at 1156 |

| | | |
|---|---|---|
| SEQ ID NO: 204 | 385 aa | MW at 43414.6 kD |

| | |
|---|---|
| NOV25i, | DVNMGPVQSKSPRFASWDEMNVLAHGLLQLGGGLREHAERTRSQLSALERRLSACGSACGGTEGSTDL |
| 226679956 | |
| Protein | PLAPESRVDPEVLHSLQTGLKAGNSRTGGLFHKVAGQQRHLEKQHLRIQHLQSQFGLLDHAALDHEVA |
| Sequence | |
| | KPARRKRLPEMAQPVDPAHNVSRLHRLPRDCGELFQVGERQSGLFEIQPQGSPPFLVNCAATSDGGWT |
| | VIQRRHDGSVDFNRPWEAYKAGFGDPHGEFWLGLEKVHSITGDRNSRLAVQLRDWDGNAELLQFSVHL |
| | GGEDTAYSLQLTAPVAGGLQATTVPPSGLSVPFSTWDQDHDLRRDKNCAKSLSGGWWFQTCSHSNLNG |
| | PQQRQKLKKGIFWKTWRGRYYPLQATTMLIQPMAAEAAS |

| | |
|---|---|
| SEQ ID NO: 205 | 1187 bp |

| | |
|---|---|
| NOV25j, | GACGTTAACATGGGACCCGTGCAGTCCAAGTCGCCGCGCTTTGCGTCCTGGGACGAGATGAATGTCCT |
| 254500319 | |
| DNA Sequence | GGCGCACGGACTCCTGCAGCTCGGCCAGGGGCTGCGCGAACACGCGGAGCGCACCCGCAGTCAGCTGA |
| | GCGCGCTGGAGCGGCGCCTGAGCGCGTGCGGGTCCGCCTGTCAGGGAACCGAGGGGTCCACCGACCTC |
| | CCGTTAGCCCCTGAGAGCCGGGTGGACCCTGAGGTCCTTCACAGCCTGCAGACACAACTCAAGGCTCA |
| | GAACAGCAGGATCCAGCAACTCTTCCACAAGGTGGCCCAGCAGCAGCGGCACCTGGAGAAGCAGCACC |
| | AAGCCTGCCCCGAAGAAAGAGGCTGCCCGAGATGGCCCAGCCAGTTGACCCGGCTCAAATGTCAGCCG |
| | CCTGCACCGGCTGCCCAGGGATTGCCAGGAGCTGTTCCAAATTGGGGAGAAAAAGAGTAAACTATTTG |
| | AAATCCAGCCTCAGGGGTCTCCGCCATTTTTGGTGAACTGCAAGATGACCTCAGATGGAGGCTGGACA |
| | GTAATTCAGAGGCGCCACGATGGCTCAGTGGACTTCAACCGGCCCTGGGAAGCCTACAAGGCGGGGTT |
| | TGGGGATCCCCACGGCGAGTTCTGGCTGGGTCTGGAGAAGGTGCATAGCATCACGGGGGACCGCAACA |
| | GCCGCCTGGCCGTGCAGCTGCGGGACTGGGATGGCAACGCCGAGTTGCTGCAGTTCTCCGTGCACCTG |
| | GGTGGCGAGGACACGGCCTATAGCCTGCAGCTCACTGCACCCGTGGCCGGCCAGCTGGGCGCCACCAC |
| | CGTCCCACCCAGCGGCCTCTCCGTACCCTTCTCCACTTGGGACCAGGATCACGACCTCCGCAGGGACA |
| | AGAACTGCGCCAAGAGCCTCTCTGGAGGCTGGTGGTTTGGCACCTGCAGCCATTCCAACCTCAACGGC |
| | CAGTACTTCCGCTCCATCCCACAGCAGCGGCAGAAGCTTAAGAAGGGAATCTTCTGGAAGACCTGGCG |
| | GGGCCGCTACTACCCGCTGCAGGCCACCACCATGTTGATCCAGCCCATGGCAGCAGAGGCAGCCTCCT |
| | AGATCGATGGGAAGGGCGAATTCTGCAGATA |

| | |
|---|---|
| ORF Start: at 1 | ORF Stop: TAG at 1156 |

| | | |
|---|---|---|
| SEQ ID NO: 206 | 385 aa | MW at 43414.6 kD |

| | |
|---|---|
| NOV25j, | DVNMGPVQSKSPRFASWDEMNVLAHGLLQLGQGLREHAERTRSQLSALERRLSACGSACQGTEGSTDL |
| 254500319 | |
| Protein | PLAPESRVDPEVLHSLQTGLKAGNSRIQQLFHKVAGQQRHLEKQHLRIQHLQSQFGLLDHKHLDHEVA |
| Sequence | |
| | KPARRKRLPEMAQPVDPAHNVSRLHRLPRDCQELFQVGERQSGLFEIQPQGSPPFLVNCKMTSDGGWT |
| | VIQRRHDGSVDFNRPWEAYKAGFGDPHGEFWLGLEKVHSITGDRNSRLAVQLRDWDQNAELLQFSVHL |
| | GGEDTAYSLQLTAPVAGGLGATTVPPSGLSVPFSTWDQDHDLRRDKNCAKSLSGGWWFGTCSHSNLNG |
| | QYFRSIPQQRQKLKKGIFWKTWRGRYYPLQATTMLIQPMAAEAAS |

| | |
|---|---|
| SEQ ID NO: 207 | 1167 bp |

| | |
|---|---|
| NOV25k, | TCATCCCGGGATGGGACCCGTGCAGTCCAAGTCGCCGCGCTTTGCGTCCTGGGACGAGATGAATGTC |
| 254500445 | |
| DNA Sequence | CTGGCGCACGGACTCCTGCAGCTCGGCCAGGGGCTGCGCGAACACGCGGAGCGCACCCGCAGTCAGC |
| | TGAGCGCGCTGGAGCGGCGCCTGAGCGCGTGCGGGTCCGCCTGTCAGGAAACCGAGGGGTCAACCGA |
| | CCTCCCGTTAGCCCCTGAGAGCCGGGTGGACCCTGAGGTCCTTCACAGCCTGCAGACACAACTCAAG |
| | GCTCAGAACAGCAGGATCCAGCAACTCTTCCACAAGGTGGCCCAGCAGCAGCGGCACCTGAAGAAGC |
| | ACACCTGCGAATTCAGCATCTGCAAAAGCCAGTTTGGCCTCCTGGACCACAAGAACCTAGACCATGA |
| | GGTGGCCAAGCCTAACCCGAAGAAAGAGGCTGCCCGAGATGGCCCAGCCAGTTAACCCGGCTAAAAT |
| | GTCGCCGCCTGCACCGGCTGCCCAGGGATTGCCAGGAAACTCTTCCAGGTTGGAAAAAGGAAGAGTG |
| | GACTATTTGAAATCCAGCCTCAGGGGTCTCCGCCATTTTTGGTGAACTGCAAGATGACCTAAGATGG |
| | AGGCTGGACAGTAATTCGACGCCCCACGATGGCTCAGTCGACTTCAACCGGCCCTCAAGAAGCCTAC |
| | AAGGCGGGGTTTGGGGATCCCCACGGCGAGTTCTGGCTGGGTCTGGAGAAGGTGCATAGCATCACGG |
| | GGGACCGCAACAGCCGCCTGGCCGTGCAGCTGCGCGACTGGGATGGCAACGCCGAGTTGCTGCAGTT |
| | CTCCGTGCACCTGGGTGGCGACGACACGGCCTATAAACCTGCAGCTCACTCAACCCGTGGCCGGCAG |
| | CTCGGCGCCACCACCGTCCCACCCAGCGGCCTCTCCGTACCCTTCTCAACTTAAGACCAGGATAACG |
| | ACCTCCGCAGGGACAAGAACTGCGCCAAGAGCCTCTCTCGAGGCTGGTGGTTTGGAACCTGAAGCCA |
| | TTCCAACCTCAACCGCCAGTACTTCCGCTCCATCCCACAGCAGCGGCAGAAGCTTAAGAAGAAAATC |
| | TTCTGGAAGACCTGGCGGGGCCGCTACTACCCGCTGCAGGCCACCACCATGTTGATCCAGCCCATGG |
| | CAGCAGAGGCAGCCTCCCGTCCACGCGT |

| | |
|---|---|
| ORF Start: at 2 | ORF Stop: end of sequence |

| | | |
|---|---|---|
| SEQ ID NO: 208 | 389 aa | MW at 43846.1 kD |

| | |
|---|---|
| NOV25k, | HPGMGPVQSKSPRFASWDEMNVLAHGLLQLGGGLREHAERTRSQLSALERRLSACGSACGGTEGSTD |
| 25450045 | |
| Protein | LPLAPESRVDPEVLHSLQTGLKAGNSRIQQLFHKVAGQQRHLEKQHLRIQHLQSQFGLLDHAALDHE |
| Sequence | |
| | VAKPARRKRLPEMAQPVDPAHNVSRLHRLPRDCQELFQVGERQSGLFEIQPQGSPPFLVNCKMTSDG |
| | GWTVIQRRHDGSVDFNRPWEAYKAGFGDPHGEFWLGLEKVHSITGDRNSRLAVQLRDWDGNAELLQF |
| | SVHLGGEDTAYSLQLTAPVAGGLGATTVPPSGLSVPFSTWDQDHDLRRDKNCAKSLSGGWWFGTCSH |
| | SWLNGGYFRSIPQQRQKLKKGIFWKTWRGRYYPLQATTMLIQPMAAEAASRRRX |

| | |
|---|---|
| SEQ ID NO: 209 | 738 bp |

| | |
|---|---|
| NOV25l, | AGATCTCTGCCCGAGATGGCCCAGCCAGTTGACCCGGCTCACAATGTCAGCCGCCTGCACCGGCTGCC |
| 248210290 | |
| DNA Sequence | CAGGGATTGCCAGGAGCTGTTCCAGGTTGGGGAGAGGCAGAGTGGACTATTTGAAATCAAGCCTAAGG |
| | GGTCTCCGCCATTTTTGGTGAACTGCAAGATGACCTCAGATGGAGGCTGGACAGTAATTCAGAGGCGC |
| | CACGATGGCTCAGTGGACTTCAACCGGCCCTGGAGAGCCTACAAGGCGGGGTTTGAAGATCCCAACGG |
| | CGAGTTCTGGCTGGGTCTCGAGAAGGTCCATAGCATCACGGGGGACCGCAACAGCCGCCTGGCCGTGC |
| | AGCTGCGGGACTGGGATGGCAACGCCGAGTTGCTGCAGTTCTCCGTGCACCTGGGTGGCGAGGACACG |
| | GCCTATAGCCTGCAGCTCACTGCACCCGTGCCGGCCAGCTGAACGCCACCACCGTCCAACCAAGCACG |
| | CCTCTCCGTACCCTTCTCCACTTGGGACCAGGATCACGACCTCCGCAGGGACAAGGAACTGCGCAAGA |
| | CCCTCTCTGGACGCTGGTGGTTTGGCACCTGCAACCATTCCAACCTCAACGGCAAGTACTTCCGCTCC |
| | ATCCCACAGCAGCGGCAGAACCTTAAGAAGGGAATCTTCTGGAACACCTGGCAAGGCCGCTACTACCC |
| | GCTGCAGGCCACCACCATGTTGATCCAGCCCATGGCAGCAGAGGCAGCCTCCCTCAAG |

| | |
|---|---|
| ORF Start: at 1 | ORF Stop: end of sequence |

| | | |
|---|---|---|
| SEQ ID NO: 210 | 246 aa | MW at 27677.9 kD |

| | |
|---|---|
| NOV25l, | RSLPEMAQPVDPAHNVSRLHRLPRDCQELFQVGERQSGLFEIQPQGSPPFLVNCKMTSDGGWTVIQRR |
| 248210290 | |
| Protein | HDGSVDFNRPWEAYKAGFGDPHGEFWLGLEKVHSITGDRNSRLAVQLRDWDGNAELLQFSVHLGGEDT |
| Sequence | |
| | AYSLQLTAPVAGGLGATTVPPSGLSVPFSTWDQDHDLRRDKNCAKSLSGGWWFGTCSHSNLNGGYFRS |
| | IPQQRQKLKKGIFWKTWRGRYYPLQATTMLIQPMAAEAASLE |

| | |
|---|---|
| SEQ ID NO: 211 | 1218 bp |

| | |
|---|---|
| NOV25m, | AGATCTGGACCCGTGCAGTCCAAGTCGCCGCGCTTTGCGTCCTGGGACGAGATGAATGTCCTGGCGC |
| 25251418 | |
| DNA Sequence | ACGGACTCCTGCAGCTCGGCCAGGGGCTGCGCGAACACGCGGAGCCAACCCGCAGTAAGCTGAGCGC |
| | GCTGGAGCGGCGCCTGAGCGCGTGCGGGTCCGCCTGTCAGGGAACCGAGGGGTCCACCGACCTCCCG |
| | TTAGCCCCTGAGAGCCGGGTGGACCCTGAGGTCCTTCACAGCCTGCAGACACAACTCAAGGCTCAGA |
| | ACAGCAGGATCCAGCAACTCTTCCACAAGGTGGCCCAGCAGCAGCGGCACCTGGAGAAGCAGCACCT |
| | GCGAATTCAGCATCTGCAAAGCCAGTTTGGCCTCCTGGACCAAAAGAACCTAGACCATGAGGTGGCC |
| | AAGCCTGCCCGAGAAAGAGGAAGGCTGCCCGAGATGGCCCAGCAAGTTGACCCAACTAATGTAAGCC |
| | GCCTGCACCGGCTGGCCCAGGGATTGCCAGGAGCTGTTCAATGTTGAAAGAAAAAGAGTGGACTATT |
| | TGAAATCCAGCCTCAGGGGTCTCCGCCATTTTTGGTGAACTGCAAGATGACCTCAGATGGAGGCTGG |
| | ACAGTAATTCAGAGGCGCCACGATGGCTCAGTGGACTTCAACCGGCCCTGGGAAGCCTACAAGGCGG |
| | GGTTTGGGGATCCCCACGGCGAGTTCTGGCTGGGTCTGGAGAAGGTGCATAGCATCACGGGGGACCG |
| | CAACAGCCGCCTGGCCGTGCAGCTGCGGGACTGGCATGGCAACGCCAAGTTGCTGCAGTTCTCCGTG |
| | CACCTGGGTGGCGAGGACACGGCCTATAGCCTGCAGCTCACTGCACCCGTGGCCGGCCAGCTGGGCG |
| | CCACCACCGTCCCACCCAGCGGCCTCTCCGTACCCTTCTCCACTTGGGACCAGGATCACGACCTCCG |
| | CAGGGACAGAGGAACTGCGCCAAGAGCCTCTCTGCCCCATCGGTGGCTAAGACCTGACAATGTTCCC |
| | TCTCCCCTGACCCCGGCAGGAGGCTGGTGGTTTGGCACCTGCAGCCATTCCAACCTCAACGGCCAGT |
| | ACTTCCGCTCCATCCCACAGCAGCGGCAGAAGCTTAAGAAAAGAATCTTCTGGAAGACCTGGCGGGG |
| | CCGCTACTAGCCCGCTGCAGGCCACCACCATGTTGATCCGCCAATGGCAGAAGAGGAAGCCTCCCTC |
| | GAGAAGGGCGAA |

| | |
|---|---|
| ORF Start: at 1 | ORF Stop: end of sequence |

| | | |
|---|---|---|
| SEQ ID NO: 212 | 406 aa | MW at 45586.0 kD |

| | |
|---|---|
| NOV25m, | RSGPVQSKSPRFASWDEMNVLAHGLLQLGGGLREHAERTRSQLSALERRLSACGSACGGTEGSTDLP |
| 252514148 | |
| Protein | LAPESRVDPEVLHSLQTGLKAGNSRIQQLFHKVAGQQRHLEKQHLRIQHLQSOFGLLDHKHLDHEVA |
| Sequence | |
| | KPARRKRLPEMAGPVDPAHNVSRLHRLPRDCGELFHGERQSGLFEIQPQGSPPFLVAACAATSDGGW |
| | TVIQRRHDGSVDFNRPWEAYKAGFGDPHGEFWLGLEKAASTTGDRNSRLAVQLRDWDGNAELLQFSV |
| | HLGGEDTAYSLQLTAPVAGQLGATTVPPSGLSVPFSTWDQDHDLRRDKNCAKSLSAPSVAQRPDHVP |
| | SPLTPACGWWFGTCSHSNLNGGYFRSIPQQRQKLKKGIFWKTWRGRYYPLQATTMLIQPMAAEAASL |
| | EKGE |

| | |
|---|---|
| SEQ ID NO: 213 | 1223 bp |

| | |
|---|---|
| NOV25n, | CAGAATTCGCCCTTAGATCTGGACCCGTGCAGTCCAAGTCGCCGCGCTTTGCGTCCTGGGACGAGAT |
| 252514189 | |
| DNA Sequence | GAATGTCCTGGCGCACGGACTCCTGCAGCTCGGCCAGGGGCTGCGCGAACACGCGGACCCAACCCGC |
| | AGTCAGCTGAGCGCGCTGGAGCGGCGCCTGAGCGCGTGCAAAGTCCGCCTGTAAGGAACCGAGGGGT |
| | CCACCGACCTCCCGTTAGCCCCTGAGAGCCGGTGGACCCTGACGTCCTTAAAAGCCTGCAGAGCACA |
| | ACTCAAGGCTCAGAACAGCAGGATCCAGCAACTCTTCCACAAGGTGGCCCAGCAGCAGCGGCACCTG |
| | GAGAGCAGCACCTGCGAATTCAGCATCTGCAAAGCCGTTTGGCCTCCTAAACCAGGAAAGAACCTAG |
| | ACCATGAGGTGGCCAAGCCTGCCCGAAGAAAGAGGCTGCCCGAGATGGCCAAGCAAGTTGACCCGGC |
| | TCACAATGTCAGCCGCCTGCACCGGCTGCCCAGGGATTGCCGAGCTGTTCGAAAGGTTGGAAAGAGG |
| | CAGAGTGGACTATTTGAAATCCAGCCTCAGGGGTCTCCGCAATTTTTGGTGAAACTGAAGATGACCT |
| | CAGATGGAGGCTGGACAGTAATTCAGAGGCGCCACGATGGCTCAGTGGACTTCAACCGGCCCTGGGA |
| | AGCCTACAGGCGGGGTTTGGGAGATCCCCACGGCGAGTTCTGGCTAAGTCTGGAGAAGGTGAATAGC |
| | ATCATGGGGGACCGCAACAGCCGCCTGGCCGTGCAGCTGCGGGACTGGGATGGAAACGCCGAGTTGC |
| | TGCAGTTCTCCGTGCACCTGGGTGGCGAGGACACGGCCTATAGCCTGGAGCTAACTGAACCCGTGGC |
| | CGGCCAGCTGGGCGCCACCACCGTCCCACCCAGCGGCCTCTCCGTACCCTTCTCCACTTGGGACCAG |
| | GATCACGACCTCCGCAGGGACAAGAACTGCGCCAAGAGCCTCTCTGCCCCATCAATAACTCAAAGAC |
| | CTGACCATGTTCCCTCTCCCCTGACCCCGGCAGGAGGCTGGTGGTTTGGCACCTGCAGCCATTCCAA |
| | CCTCACGGCCGTACTTCCGCTCCATCCCACAGCAGCGGAAGAAAGCTTAAGAAGGGAATCTTCTGG |
| | AAGACCTGGCGGGGCCGCTACTACCCGCTGCAGGCCACCACCATGTTGATCCAGCCCATGGCAGCAG |
| | AGGCAGCCTCCCTCGAG |

| | |
|---|---|
| ORF Start: at 3 | ORF Stop: end of sequence |

| | | |
|---|---|---|
| SEQ ID NO: 214 | 407 aa | MW at 45753.2 kD |

| | |
|---|---|
| NOV25n, | EFALRSGPVQSKSPRFASWDEMNVLAHGLLQLGQGLREHAERTRSQLSALERRLSACGSACQGTETS |
| 252514189 | |
| Protein | TDLPLAPESRVDPEVLHSLQTQLKAQNSRIQQLFHKVAQQQRHLEKQHLRIQHLQSQFGLLDHKHLD |
| Sequence | |
| | HEVAKPARRKRLPEMAQPVDPAHNVSRLHRLPRDCQELFQVGERQSGLFEIQPQGSPPFLVNCKMTS |
| | DGGWTVIQRRHDGSVDFNRPWEAYKAGFGDPHGEFWLGLEKVHSIMGDRNSRLAVQLRDWDGNAELL |
| | QFSVHLGGEDTAYSLQLTAPVAGGLGATTVPPSGLSVPFSTWDQDHDLRRDKNCAKSLSAPSVAQRP |
| | DHVPSPLTPAGGWWFGTCSHSNLNGGYFRSIPQQRQKLKKGIFWKTWRGRYYPLQATTMLIQPMAAE |
| | F |

| | |
|---|---|
| SEQ ID NO: 215 | 1041 bp |

| | |
|---|---|
| NOV25o, | AGATCTGGACCCGTGCAGTCCAAGTCGCCGCGCTTTGCGTCCTGGGACGAGATGAATGTCCTGGCGC |
| 252514198 | |
| DNA Sequence | ACGGACTCCTGCAGCTCGGCCAGGGGCTGCGCGAACACGCGGAGCGCACCCGCAGTCAGCTGAGCGC |
| | GCTGGAGCGGCGCCTGAGCGCGTGCGGGTCCGCCTGTCAGGGAACCGAGGGGTCCACCGACCTCCCG |
| | TTAGCCCCTGAGAGCCGGGTGGACCCTGAGGTCCTTCACAGCCTGCAGACACAACTCAAGGCTCAGA |
| | ACAGCAGGATCCAGCAACTCTTCCACAAGGTGGCCCAGCAGCAGCGGCACCTGGAGAAGCAGCACCT |
| | GCGAATTCAGCATCTGCAAAGCCAGTTTGGCCTCCTGGACCACAAGCACCTAGACCATGAGGTGGCC |
| | AAGCCTGCCCGAAGAAACAGGCTGCCCGAGATGGCCCAGCCAGTTGACCCGGCTAAAAATGTAAGCC |
| | GCCTGCACCATGGAGGCTGGACAGTAATTCAGAGGCGCCACGATGGCTCAGTGGACTTCAACCGGCC |
| | CTGGGAAGCCTACAACGCGGGGTTTGGGGATCCCCACGGCGAGTTCTAACTGGGTCTGGAGAAGGTG |
| | CATAGCATCATGGGGGACCGCAACAGCCGCCTGGCCGTGCAGCTAACGGAACTGGATGGAAACGCCG |
| | AGTTGCTGCAGTTCTCCGTGCACCTGGGTGGCGAGCACACAACCTATAGCCTGAAGCTAACTGAACC |
| | CGTGGCCGCCCAGCTGGGCGCCACCACCGTCCCACCCAGCGGCCTCTCCGTACCCTTCTCAACTTGG |
| | GACCAGGATCACGACCTCCGCAGGGACAAGAACTGCGCCAAGAGCCTCTCTGGAGGCTAATAATTTG |
| | GCACCTGCAGCCATTCCAACCTCAACGGCCAGTACTTCCGCTCCATCCCACAGCAGCGGCAGAAGCT |
| | TAAGAGGGAATCTTCTGGAAGACCTGGCGGGGCCGCTACTACCCGCTGCAAGGCCACCACAATGTTG |
| | ATCCAGCCCATGGCAGCAGAGCCAGCCTCCCTCGAG |

| | |
|---|---|
| ORF Start: at 1 | ORF Stop: end of sequence |

| | | |
|---|---|---|
| SEQ ID NO: 216 | 347 aa | MW at 39173.8 kD |

| | |
|---|---|
| NOV25o, | RSGPVQSKSPRFASWDEMNVLAHOLLQLGGGLREHAERTRSQLSALERRLSACGSACGGTEGSTDLP |
| 252514198 | |
| Protein | LAPESRVDPEVLHSLQTGLKAGNSRIQQLFHKVAGQQRHLEKQHLRIQHLQSQFGLLDHAALDHEVA |
| Sequence | |
| | HSIMGDRNSRLAVQLRDWDGNAELLQFSVILGGEDTAYSLQLTAPVAGGLGATAAPPSGLSVPFSTW |
| | KPARRKRLPEMAQPVDPAHNVSRLHHGGWTVIQRRHDGSVDFNRPWEAYKAGFGDPHGEFWLGLEKV |
| | DQDHDLRRDKNCAKSLSGGWWFGTCSHSNLNGGYFRSIPQQRQKLKKGIFWKTWRGRYYPLQATTML |
| | IQPMAAEAASLE |

| | |
|---|---|
| SEQ ID NO: 217 | 1209 bp |

| | |
|---|---|
| NOV25p, | AGATCTGGACCCGTGCAGTCCAAGTCGCCGCGCTTTGCGTCCTGGGACGAGATGAATGTCCTGGCGC |
| 252514198 | |
| DNA Sequence | ACGGACTCCTGCAGCTCGGCCAGGGGCTGCGCGAACACGCGGAGCGAACCCGAAGTAAGCTAAGCGC |
| | GCTGGAGCGGCGCCTGAGCGCGTGCGGGTCCGCCTGTCAGGGAACCGAAAAATCGACCGACCTCCCG |
| | TTAGCCCCTGAGAGCCGGGTGGACCCTGAGGTCCTTCACAGCCTGCAGACACAACTCAAGGCTGAGA |
| | ACAGCAGGATCCAGCAACTCTTCCACAAGGTGGCCCAGCAGCAGCGGCACCTGGAGAAGCAGCACCT |
| | GCGAATTCAGCATCTGCAAGCGCAGTTTGGCCTCCTGGACCACAAGCACCTAGACGATGAGGTGGCC |
| | AGCCTGCCCGAAGAAAGAGGCTGGCCCGAGATGGCCCAGCCAGTTGACCCGGCTCAGAATGTGAGCC |
| | GCCTGACCGGCTGCCCGGGATTGGGCCAGGAGCTGTTCCAGGTTGGGGAGAGGGAGAGTGGACTATT |
| | TGAAATCCAGCCTCAGGGTCTCCGCGGCATTTTTGGTGAACTGAAGATGACCTGAGATAAAGGCTGG |
| | ACAGTAATTCAGAGGCGCCACGATGGCTCAGTGGACTTCAACCGGCCCTGAAAAGCCTACAAGGCGG |
| | GGTTTGGGGATCCCCACGGCGAGTTCTGGGCTGGGTCTGGAGAAGGTGGATAGGATGACGGAAACCG |
| | CAACAGCCGCCTGGCCGTGCAGCTGCGGGACTGGGATGGCAACGCCGAGTTGCTGGAGTTCTCCGTG |
| | CACCTGGGTGGCGAGGACACGGCCTATAGCCTGCAGCTCACTGCACCCGTGGCCGGCCAGCTGGGCG |
| | CCACCACCGTCCCCCCAGCGGCCTCTCCGTAACCCTTCTCCACTTGGGACGAGGATGACGACCTCCG |
| | CAGGGACAAGAACTGCGCCAGAGCCTCTCTGGAGCCCCATCGGTAACTCAGACCTGACGATGTTCCC |
| | TCTCCCCTGACCCCGGCAGGAGGCTGGTGGTTTGGAGCACCTGCAGCGATTCAACCTAACGGCGAGT |
| | ACTTCCGCTCCATCCCACAGCAGCGGCAGAAGCTTAAGAAGGGAATCTTCTGGAAGACCTGGCGGGG |
| | CCGCTACTACCCGCTGCAGGCCACCACCATGTTGATCCAGCCGATAAGAGGAGAGGGAGCCTCCCTC |
| | GAG |

| | |
|---|---|
| ORF Start: at 1 | ORF Stop: end of sequence |

| | | |
|---|---|---|
| SEQ ID NO: 218 | 403 aa | MW at 45262.6 kD |

| | |
|---|---|
| NOV25p, | RSGPVQSKSPRFASWDEMNVLAHGLLQLGGGLREHAERTRSQLSALERRLSACGSACGGTEGSTDLP |
| 252514202 | |
| Protein | LAPESRVDPEVLHSLQTQLKAQNSRIQQLFHKVAQQQRHLEKQHLRIQHLQSQFGLLDHKHLDHEVA |
| Sequence | |
| | KPARRKRLPEMAGPVDPAIVSRLHRLPRDCGELFQVGERQSGLFEIQPQGSPPAALAACAATSDGGW |
| | TVIQRRHDGSVDFNRPWEAYKAGFGDPHGEFWLGLEKVHSITGDRNSRLAVQLRDWDGNAELLQFSV |
| | HLGGEDTAYSLQLTAPVAGQLGATTVPPSGLSVPFSTWDQDHDLRRDKNCAKSLSAPSVAQRPDHVP |
| | SPLTPAGGWWFGTCSHSNLNGGYFRSIPQQRQIKKGIAAWKTWRGRYYPLQATTMLIQPMAAEAASL |
| | E |

| | |
|---|---|
| SEQ ID NO: 219 | 1258 bp |

| | |
|---|---|
| NOV25q, | AAGGCTCCGCGGCCGCCCCCTTCACCATGAGCGGTGCTCGACGGCCGGGGCAGCCCTGATGCTCTGC |
| 228039766 | |
| DNA Sequence | GCCGCCACCGCCGTGCTACTGAGCGCTCAGGGCGGACCCGTGCAGTCCAGTCAACCGCGCTTTGCGT |
| | CCTGGGACGAGATGATGTCCTAAGCGCACGGACTCCTGCAGCTCGGCCAGGGGCTGCGCGAACACGC |
| | GGAGCGCACCCGCAGTCAGCTGAGCGCGCTGGAGCGGCGCCTGAGCGCGTGCGGGTCCGCCTGTCAG |
| | GGAACCGAGGGGTCAGCCGACCTCCCGTTAGCCCCTGAGAGCCGGGTGGACCCTGAGGTCCTTCACA |
| | GCCTGCAGACACACTCGAAGGCTCAGAACAGCAGGATCCAGCAACTCTTCCACAAGGTGGCCCAGCA |
| | CCAGCGGCGACCTGGAGAAGCAGCACCTGCGATTCAGCATCTGCAAACCCAGTTTGGCCTCCTGGAC |
| | CACAAGCACCTAGAACCATGAGGTGGCCAAGCCTGCCCGAGAAAGAGGCTGCCCGAGATGGCCCAGC |
| | CAGTTGACCCCGCTCACATGTCAGCCGCCTGCACCGAACTGCCCAGGGATTGCCAGGAGCTGTTCCA |
| | GGTTGGGGAGAGAACAGAGTGGACTATTTGAATCCAGCCTCAGGCGTCTCCGCCATTTTTGGTGAAC |
| | TGCAAGATGACCTCAGATGGAGGCTGGACAGTAATTCAGAGGCGCCACGATCGCTCACTCGACTTCA |
| | ACCGGCCCTGGGAAGCCTACAAGGCGGGGTTTGGCGATCCCCACGGCGAGTTCTGGCTGGGTCTGGA |
| | GAAGGTCCATAGCATCACGGGGGACCGCAACAGCCGCCTGGCCGTGCAGCTGCGGGACTGGGATGGC |
| | AACGCCGAGTTGCTGCAGTTCTCCGTGCACCTCGGTGGCGAGGACACGGCCTATAGCCTGCAGCTCA |
| | CTGCACCCGTGGCCGGCCAGCTGGGCGCCACCACCGTCCCACCCAGCGGCCTCTCCGTACCCTTCTC |
| | CACTTGGCACCAGGATCACGACCTCCGCAGGGACAAGAACTGCGCCAAGAGCCTCTCTGGAGGCTGG |
| | TGGTTTGGCACCTGCAGCCATTCCACCTCAACGGCCAGTACTTCCGCTCCATCCCACAAACAGCGGC |
| | AGAAGCTTAAGAAGGGAATCTTCTCGAAGACCTGGCGGGGCCGCTACTACCCGCTGCAGGCCACCAC |
| | CATGTTGATCCAGCCCATGGCAGCAGAGGCAGCCTCCAACGGTGGGCGCGCC |

| | |
|---|---|
| ORF Start: at 2 | ORF Stop: end of sequence |

| | | |
|---|---|---|
| SEQ ID NO: 220 | 419 aa | MW at 46386.0 kD |

| | |
|---|---|
| NOV25q, | GSAAAPFTMSGAPTAGAALMLCAATAVLLSAQGGPVQSKSPRFASWDEMNVLAHGLLQLGGGLREHA |
| 228039766 | |
| Protein | ERTRSQLSALERRLSACGSACGGTEGSTDLPLAPESRVDPEVLHSLQTGLKAGNSRIQQLFHKVAGQ |
| Sequence | |
| | QRHLEKQHLRIQHLQSQFGLLDHKHLDHEVARPARRKRLPEMAGPVDPAHNVSRLHRLPRDCGELFQ |
| | VGERQSGLFEIQPQGSPPFLVACKAATSDGWTVIQRRHDGSVDFNRPWEAYKAGFGDPHGEFWLGLE |
| | KVHSITGDRNSRLAVQLRDWDGNAELLQFSVHLCGEDTAYSLQLTAPVAGGLCATTVPPSGLSVPFS |
| | TWDQDHDLRRDKNCAKSLSGGWWFGTCSHSNLNGGYFRSIPQQRQKLKKGIFWKTWRGRYYPLQATT |
| | MLIQPMAAEAASKGGRA |

| | |
|---|---|
| SEQ ID NO: 221 | 1239 bp |

| | |
|---|---|
| NOV25r, | GACGTTAACATGAGCGGTGCTCCGACGGCCGGGGCAGCCCTGATGCTCTGCGCCGCCACCGCCGTGC |
| 226679952 | |
| DNA Sequence | ACTGAGCGCTCAGGGCGGACCCGTGCAGTCCAGTCGCCGCGCTTTGCGTCCTGGCACGAGATGAATC |
| | TCCTGGCGCACCGACTCCTGCAGCTCGGCCAGGGGCTGCGCGACACGCGGAGCGCACCCGCAGTCAG |
| | CTGAGCGCGCTGGAGCGGCGCCTGAGCGCGTGCGGGTCCGCCTGTCAGGGACCCAGGGGTCCACCGA |
| | CCTCCCATTACCCCCTGAAGCCGGGTGGACCCTGAGGTCCTTCACAGCCTGCAGACACAACTCAAGG |
| | CTCAGACAGCAGGATCCAGCAACTCTTCCACAAGGTCGCCCAGCAGCAGCGGCACCTGGAGAAGCAG |
| | CACCTGCGAATTCAGCATCTGCAAGCCAGTTTGGCCTCCTGGACCACAAGCACCTAGACCATGACGT |
| | CGCCAAGCCTGCCCGAAGAAGAGGCTGCCCGAGATGCCCCAGCCAGTTGACCCGGCTCACAATGTCA |
| | GCCGCCTGCACCGGCTGCCCAGGGATTGCCAGGAGCTGTCCAGGTTCCGCAGAGGCAGAGTCGACTA |
| | TTTGAAATCCAGCCTCAGGGGTCTCCGCCATTTTTGGTGACTGCAAGATGACCTCACATGGAGGCTG |
| | GACAGTAATTCAGAGGCGCCACGATGGCTCAGTGGACTTCACCGGCCCTGGGAAGCCTACAAGCCGG |
| | GGTTTGGGGATCCCCACGGCGAGTTCTGGCTGGGTCTGGAGAGGTGCATAGCATCACGGGGGACCGC |
| | AACAGCCGCCTGGCCTTGCAGCTGCGGGACTGCGATGGCACGCCGAGTTGCTGCAGTTCTCCGTGCA |
| | CCTGAAGTGGCCAGGACACGGCCTATAGCCTGCAGCTCACTGCACCCGTGGCCGGCCAGCTGCGCCA |
| | CCACCGTCCCACCCAGCGGCTCTCCGTACCCTTCTCCACTTCGGACCAGGATCACGACCTCCGCAGG |
| | GACAAGAACTGGACAAGAGCCTCTCTCGAGGCTGGTGGTTTGGCACCTGCAGCCATTCCAACCTCAA |
| | CGGCCAGTACTTCCGCTCCATCCCACAGCAGCCGCAGAGCTTAAGAAGGGAATCTTCTGGAAGACCT |
| | GGCGGGGCCGCTACTCCCGCTGCAGGCCACCACCATGTTGATCCAGCCCATGCCAGCAGAGGCAGCC |
| | TCCTAGATCGATGGG |

| | |
|---|---|
| ORF Start: at 1 | ORF Stop: TAG at 1228 |

| | | |
|---|---|---|
| SEQ ID NO: 222 | 409 aa | MW at 45556.0 kD |

| | |
|---|---|
| NOV25r, | DVNMSGAPTAGAALMLCAATAVLLSAGGGPVQSKSPRFASWDEMNVLAHQLLQLGGGLREHAERTRSQ |
| 226679952 | |
| Protein | LSALERRLSACGSACGGTEGSTDLPLAPESRVDPEVLHSLQTGLKAGUSRIQQLFHKVAGQQRHLEKQ |
| Sequence | |
| | HLRIQHLQSQFGLLDHKHLDHEVAKPARRKRLPEMAGPVDPAHNVSRLHRLPRDCGELFQVGERQSGL |
| | FEIQPQGSPPFLVNCKMTSDGGWTVIQRHDGSVDFNRPWEAYKAGFGDPHGEFWLGLEICVHSITGDR |
| | NSRLALQLRDWDGNAELLQFSVHLCGEDTAYSLQLTAPVAGGLCATTVPPSGLSVPFSTWDQDHDLRR |
| | DKNCAKSLSGGWWFGTCSHSNLNGGYFRSIPQQRQKLKKGIFWKTWRGRYYPLQATTMLIQPMAAEAA |
| | S |

| | |
|---|---|
| SEQ ID NO: 223 | 1143 bp |

| | |
|---|---|
| NOV25s, | GGACCCGTGCAGTCCAAGTCGCCGCGCTTTGCGTCCTGGGACGAGATGAATGTCCTGGCGCACGGACT |
| CG57094-02 | |
| DNA Sequence | CCTGCAGCTCGGCCAGGGCTGCGCGAACACGCAGAAGCGAACCCGAAGTAAGCTGAGCGCGCTGGAGC |
| | GGCGCCTGAGCGCGTGCGGGTCCGCCTGTCACGAACCGGAAAAGTCAACCGACCTCCCGTTAGCCCCT |
| | GAGAGCCGGGTGGACCCTGAGGTCCTTCACAGCCTGCAGACACAACTCAAGGCTCAGAACAGCAGGAT |
| | CCAGCAACTCTTCCACAAGGTGGCCCAGCAGCAGCGGCACCTGGAGAAGCAGCACCTGCGAATTCAGC |
| | ATCTGCAAAGCCAGTTTGGCCTCCTGGACGGCACGAACCTAGACAATGAAATGGCCAAGCCTGCCCGA |
| | AGAAGAGGCTGCCCGAGATGCCCAGCCAGTTGACCCGGCTAACGAAATGTCAGCCGCCTGAACCGGCT |
| | GCCCAGGGGAATTGCCAGGAGCTGTTCCAGTTGGAAAGAGGAAGAGTGGACTATTTGAATCCAGCCTC |
| | AGGGGTCTCCGCCATTTTTCGTGGGACTCCAGATGACCTCAGATGGAGGCTGAAAAGTAATTAAGAGG |
| | CGCCACGATGGCTCAGTGGACTTCAACCGGCCCTGGGAAGCCTACAAGGCGGGGTTTGGGGATCCCCA |
| | CGGCGAGTTCTGGGCTGGGTCTGGAGAAGGTGCATAGAATCACGGGGAACCGAAAAGCCGCCTGGCCG |
| | TGCAGCTGCGGGACTGGGATGGCAACGCCAGTTGCTGCAGTTCTCCGTGCACCTGGGTGGCGAGGAGA |
| | ACGGCCTATAGCCTGCAGCTCACTGCACCCGTGGCCAACAAGCTGGGCGCAACCACCGTCCCACCAAG |
| | CGGCCTCTCCGTACCCTTCTCCACTTGGGACCAGGATCACGACCTCCGCAGGGACAAGAACTGCGCCA |
| | AGAGCCTCTCTGGAGGCTGGTGGTTTGGCACCTGCAGCCATTCCAACCTCAACGGCCAGTACTTCCGC |
| | TCCATCCCACAGCAGCGGCAGAAGCTTAAGAAGGGAATCTTCTGGAAGACCTGGCGGGGCCGCTACTA |
| | CCCGCTGCAGGCCACCACCATGTTGATCAGCCCATGGCAGCAGAGGCAGCCTTCC |

| | |
|---|---|
| ORF Start: at 1 | ORF Stop: end of sequence |

| | | |
|---|---|---|
| SEQ ID NO: 224 | 381 aa | MW at 42955.0 kD |

| | |
|---|---|
| NOV25s, | GPVQSKSPRFASWDEMVLAHGLLQLGGGLRE11AERTRSQLSALERRLSACGSACGGTEGSTDLPLAP |
| CG57094-02 | |
| Protein | ESRVDPEVLHSLQTGLKAGNSRIQQLFHKVAGQQRHLEKQHLRIQHLQSQFGLLDHAALDHEVAKPAR |
| Sequence | |
| | RKRLPEMAGPVDPAHNVSRLHRLPRDCGELFQVGERQSGLFETGPQGSPPFLVNCKMTSDGGWTVIQR |
| | RHDGSVDFNRPWEAYKAGFGDPHGEFWLGLEKVHSITGDRNSRLAVQLRDWDGNAELLQFSVHLGGED |
| | TAYSLQLTAPVAGGLGATTVPPSGLSVPFSTWDQDHDLRRDAAAAKSLSAAWAAGTCSHSNLNQQYFR |
| | SIPQQRQKLKKGIFWKTWRGRYYPLQATTMLIQPMAAEAAS |

| | |
|---|---|
| SEQ ID NO: 225 | 1154 bp |

| | |
|---|---|
| NOV25t, | AGATCTGGACCCGTGCAGTCCAAGTCGCCGCGCTTTGCGTCCTGGGACGAGATGAATGTCCTGGCGCA |
| CG57094-03 | |
| DNA Sequence | CGGACTCCTGCAGCTCGGCCAGGGGCTGCGCGAACACGCGGAGCGCACCCGCAGTCAGCTGAGCGCGC |
| | TGGAGCGGCGCCTGAGCGCGTGCGGGTCCGCCTGTCAGGGAACCGAGGGGTCAACCAACCTCCCGTTA |
| | GCCCCTGAGAGCCGGGTGGACCCTGAGGTCCTTCACAGCCTGCAGACACAACTCAAGGCTCAGAACAG |
| | CAGGATCCAGCAACTCTTCCACAAGGTGGCCCAGCAGCAGCGGCACCTGGAGAAGCAGCACCTGCGAA |
| | TTCAGCATCTGCAAAGCCAGTTTGGCCTCCTGGACCACAAGCACCTAGACCATGAGGTGGCCAAGCCT |
| | GCCCGAAGAAAGAGGCTGCCCGAGATGGCCCAGCCAGTTGACCCGGCTCACAATGTCAGCCGCCTGCA |
| | CCGGCTGCCCAGGGATTGCCAGGAGCTGTTCCAGGTTGGGAAGAGCCAGAGTGAACTATTTAAAATCC |
| | AGCCTCAGGGGTCTCCGCCATTTTTGGTGAACTGCAAGATGACCTCAGATGGAGGCTGGACAGTAATT |
| | CAGAGCGCCACGATGGCGGATCAGTGGACTTCACCGGCCCTGGGAAGCCTAAAGGCGGGGTTTGAAGA |
| | TCCCCCACGGCGAGTTCTGGCTGGGTCTGGAGAAGGTGCATAGCATCACGGGGGACCGCACAGCCGCC |
| | TGGCCGTGCAGCTGCGGACTGGGATGGCAACGCCCAGTTGCTGAAGTTCTCCGTGAACACTGGGTGGC |
| | GAGGACACGGCCTATAGCCTGCAGCTCACTGCACCCGTGGCCGGCAAGCTGGGCGCAACCACCGTCCC |
| | ACCCAGCGGCCTCTCCGTACCCTTCTCCACTTGGGACCAGGATCACGATCTCCGCAGGGACAAGAACT |
| | GCGCCAAGAGCCTCTCTGGAGGCTGGTGGTTTGGCACCTGCAGCCATTCCAACCTCAACGGCCAGTAC |
| | TTCCGCTCCATCCCACAGCAGCGGCAGAAGCTTAAGAAGGGAATCTTCTGGAAGACCTGGCGGGGCCG |
| | CTACTACCCGCTGCAGGCCACCACCATGTTGATCCAGCCCATGGCAGCAGAGGAGCCTCCCTCGAG |

| | |
|---|---|
| Start: at 1 | ORF Stop: at 1153 |

| | | |
|---|---|---|
| SEQ ID NO: 226 | 384 aa | MW at 43379.5 kD |

| | |
|---|---|
| NOV25t, | RSGPVQSKSPRFASWDEMNVLAHGLLQLGGGLREHAERTRSQLSALERRLSACGSACGGTEGSTDLPL |
| CG57094-03 | |
| Protein | APESRVDPEVLHSLQTQLKAQNSRIQQLFHKVAQQQRHLEKQHLRIQHLQSQFGLLDHKHLDHEVAKP |
| Sequence | |
| | ARRKRLPEMAGPVDPAIIVSRLHRLPRDCGELAGVGERQSGLFEIQPQGSPPFLAACAATSDGGWTVI |
| | QRRHDGSVDFARPWEAYKAGFGDPHGEFWLGLEKVHSITGDRNSRLAVQLRDWDGNAELLQFSAALGG |
| | EDTAYSLQLTAPVAGQLGATTVPPSGLSVPFSTWDQDHDLRRDKNCAKSLSGGWWFGTCSHSNLNGQY |
| | FRSIPQQRQKLKKGIFWKTWRGRYYPLQATTMLIQPMAAEEPPS |

| | |
|---|---|
| SEQ ID NO: 227 | 1155 bp |

| | |
|---|---|
| NOV25u, | AGATCTGGACCCGTGCAGTCCAAGTCGCCGCGCTTTAACGTCCTGGGACGAGATGAATGTCCTGGCGC |
| CG57094-04 | |
| DNA Sequence | ACGGACTCCTGCAGCTCGGCCAGGGCTGCGCGAACACGCGGAGCGCACCCGAAGTAAGCTAAGAGCGC |
| | GCTGGAGCGGCGCCTGAGCGCGTGCGGGTCCGCCTGTGGGAACCGAGGAATCAACCGACCTCAAGCCG |
| | TTAGCCCCTGAGAGCCGGGTGGACCCTGAGGTCCTTCACAGCCTGCAGACAACTCAAGGCTCAGGGA |
| | ACAGCAGGATCAGCACTCTTCCACAAGGTGGCCCAGCAGCAGCAACACCTAAAGAAGGCAGCAACCT |
| | GCGAATTCAGCATCTGCAAGCCAGTTTGGCCTCCTGGACGGAACAAGAACCTAGACATGAATAGGCC |
| | AAGCCTGCCCGAAGAAAGAGGCTGCCCGAGATGGCCCAGCCAGTTGACCCGGCTCACAATGTCAGCC |
| | GCCTGCACCGGCTGCCCAGGGATTGCCAGGAGCTGTTCCAGGTTGGGGAGAGGCAGAGTGGACTATT |
| | TGAAATCCAGCCTCAGGGGTCTCCGCCATTTTTGGTGAACTGCAAGATGACCTCAGATGGAGGCTGG |
| | ACAGTAATTCAGAGGCGCCACGATGGCTCAGTGGACTTCAACCGGCCCTGAAAACCTGGAAAGGCGG |
| | GGTTTGGGGATCCCCACGGCGAGTTCTGGCTGGGTCTGGAGAAGGTGCATAGCATCACGGGGGACCG |
| | CACAGCCAACCTGGCCGTGCAGCTGCGGGACTGGGATGGCAACGCCGAGTTGCTGAAGTTCTCCGTG |
| | CACCTGGGTGGCGGACACGGCCTATAGCCTGCAGCTCACTGCACCCGTAACCGGCCAGGGCTGAACG |
| | CCACCACCGTCCCACCCAGCGGCCTCTCCGTACCCTTCTCCACTTGACAAAAATAACGAGACCTCCG |
| | CAGGACAAGAACTGCGCCAAGAGCCTCTCTGAGGCTGGTGGTTTGGAACCTGCAGCAAGGGTTCAAC |
| | CTCAACGGCCAGTACTTCCGCTCCATCCCACAGCAGCGGCAGAAGCTTAAGAAGGGAATCTTCTGGA |
| | AGACCTGGCGGGCCGCTACTACCCGCTGCAGGCCACCACCATGTTGATCAAGCCAATGGGAAGAAGA |
| | GGCAGCCTCCCTCGAG |

| | |
|---|---|
| ORF Start: at 7 | ORF Stop: end of sequence |

| | | |
|---|---|---|
| SEQ ID NO: 228 | 383 aa | MW at 43197.3 kD |

| | |
|---|---|
| NOV25u, | GPVQSKSPRFASWDEMNVLAHGLLQLGGGLREHAERTRSQLSALERRLSACGSACGGTEGSTDLPLA |
| CG57094-04 | |
| Protein | PESRVDPEVLHSLQTGLKAGNSRIQQLFHKVAGQQRHLEKQHLRIQHLQSQFGLLDHAALDHEVAKP |
| Sequence | |
| | ARRKRLPEMAGPVDPAHNVSRLHRLPRDCGELFQVQERQSGLFEIQPQGSPPFLVNCKMTSDGGWTV |
| | IQRRHDGSVDFNRPWEAYKAGFGDPHGEFWLGLEKVHSITGDRNSRLAVQLRDWDGNAELLQFSVHL |
| | GGEDTAYSLQLTAPVAGQLGATTVPPSGLSVPFSTWDQDHDLRRDKNCAKSLSGGWWFGTCSHSNLN |
| | PQQRQKLKKGIFWKTWRGRYYPLQATTMLIQPMAAEAASLE |

| | |
|---|---|
| SEQ ID NO: 229 | 1155 bp |

| | |
|---|---|
| NOV25v, | AGATCTGGACCCGTGAGTCCAGTCGCCGCGCTTTGCGTCCTGGAACGAGATGAAATGTCCTGGCGC |
| CG57094-05 | |
| DNA Sequence | ACGGACTCCTGCAGCTCGGCCAGGGCTGCGCCAACACGCGGAGCGAACCCGAAGTAAGCTGAGCGC |
| | GCTGGAGCGGCGCCTGAGCGCGTGCGCGTCCGCCTGTCAGGGCCGAGGGAATCCACCGACCTCCCG |
| | TTAGCCCCTTGTGAGAGCCGGGTGGACCCTGAGGTCCTTCACAGCCTGAAACTAAGGCTAAGA |
| | ACAGCAGGATCCAGCAACTCTTCCACAAGGTGGCCCAGCAGCAGCCCTGAAAAAGCAGCACCT |
| | AAGCCTGCCCGGAAGAGGCTGCCCGAGATGGCCCAGCCAGTTGACCCAACTAAAATGTAAGCC |
| | GCCTCCACCGGCTGCCCAGATTGCCAGGAGCTGTTCCAGGTTAGAGAGGAAGAGTGGACTATT |
| | TGAAATCCAGCCTCAGGGGTCTCCGCCATTTTTGGTGACTGGATGACCTAAGATGGAGGCTGG |
| | ACAGTAATTCAGAGGCGCCACGATGGCTCAGTGGACTTAACCGGCCCTGAGCCTAAAAGGCGG |
| | GTTTGGGGATCCCCACGGCGAGTTCTGGCTGGGTCTCGAGAAGGTATAGATAACGGGAAACCG |
| | CAACAGCCGCCTCGCCGTGCAGCTGACTGGGATGGCAACGCCGAGTTGCTGAAGTTCTCCGTG |
| | CACCTCGGTGGCGAGAACACCGCCTATAGCCTGCAGCTCACTGCGTGGCCGGCAACCTGGGCG |
| | CCACCACCGTCCCACCCGCGGCCTCTCCGTACCCTTCTCCACTTGACAAAATAACGACCTCCG |
| | CAGGGACAAGACTGCGCCAGAGCCTCTCTGGACGCTGGTGGTTTGGAACCTGCAGCAATTCAC |
| | CTCAACGGCCAGTACTTCCGCTCCATCCCACAGCAGGCGGCAGAAACTTAAGAATCTTCTAAA |
| | AGACCTGGCGGGGCCGCCACTACCCGCTGCAGGCCACCACCATGTCGATCCAGCCCATGGCAG |
| | GGCAGCCTCCCTCGAG |

| | |
|---|---|
| ORF Start: at 7 | ORF Stop: at 1150 |

| | | |
|---|---|---|
| SEQ ID NO: 230 | 381 aa | MW at 42902.9 kD |

| | |
|---|---|
| NOV25v, | GPVQSKSPRFASWDEVLAHGLLQLGGGLREHAERTRSQLSALERRLSACGSACGGTECSTDLPLA |
| CG57094-05 | |
| Protein | PESRVDPEVLHSLQTGLCAGNSRIQQLFHKVAGQQRHLEKQHLRIOHLQSQFGLLDHLDHEVAKP |
| Sequence | |
| | ARRKRLPEMAGPVDPAVSRLHRLPRDCGELFQVGERQSGLFEIQPQGSPPFLAACAATSDGGWTV |
| | IQRRHDGSVDFNRPWEAYKAGFGDPHGEFWLGLEKVHSITGDRNSRLAVRDWDGNAELLQFSVHL |
| | GGEDTAYSLQLTAPVAGGLGATTVPPSGLSVPFSTWDQDHDLRRD1CAKSLSGGAAFGTCSHSAN |
| | GQYFRSIPQQRQKLKKGIFWKTWRGRHYPLQATTPMSIQPMAAEAAS |

| | |
|---|---|
| SEQ ID NO: 231 | 1154 bp |

| | |
|---|---|
| NOV25w, | AGATCTGGACCCGTGCAGTCCAAGTCGCCGCGCTTTGTGTCCTGGGACGAGATGAATGCCCTGGCGC |
| CG57094-06 | |
| DNA Sequence | ACGGACTCCTGCAGCTCGGCCAGGGGCTGCGCGAACACGCGGAGCGCACCCGCAGTCAGCTGAGCGC |
| | GCTGGAGCGGCGCCTGAGCGCGTGCGGGTCCGCCTGTCAGGCCGAGAATCAACCGACCTCCCG |
| | TTAGCCCCTGAGAGCCGGGTGGACCCTGAGGTCCTTCACAGCCTGCAGACACAACTCAAGGCTAGA |
| | ACAGCAGGATCCAGCAACTCTTCCACAAGGTGGCCCAGCAGCAGCGGCACCTGGAGAAGCAGCACCT |
| | GCGAATTCAGCATCTGCAAAGCCAGTTTGGCCTCCTGGACCACAAGCACCTAGACCATGAGGTGGCC |
| | AAGCCTGCCCGAAGAAAGAGGCTGCCCGAGATGGCCCAGCCAGTTGACCCGGCTCACAATGTCAGCC |
| | GCCTGCACCGGCTGCCAGGGATTGCCAGGAGCTGTTCCAGGTTGGGGAGAGGCAGAGTGGACTAATT |
| | TGAAATCCAGCCTCAGGGGTCTCCGCCATTTTTGGTGAACTGCAAGATGACCTCAGATGGAGGCTGG |
| | ACAGTAATTCAGAGGCGCCACGATGGCTCAGTGGACTTCAACCGGCCCTGGGAAGCCTACAAGGCGG |
| | GGTTTGGGGATCCCCACGGCGAGTTCTGGCTGGGTCTGGAGAAGGTGCATAGCATCATGGGGGACCG |
| | CAACAGCCGCCTGGCCGTGCAGCTGCGGGACTGGGATGGCAACGCCGAGTTGCTGCAGTTCTCCGTG |
| | CAACAGCCGCCTGGCCGTGCAGCTGCGGGACTGGGATGGCAACGCCGAGTTGCTCAAGTTCTCCGTG |
| | ACCTAAGTGGCGAGGACACAACCTATAGCCTGCAGCTAACTGCACCCGTAACCGGCCAGCTGAGGCG |
| | CCACCACCGTCCCACCCGCGGCGAGGTCTCCGTACCCTTCTCAACTTAAGACAATAACGAGCCTCCG |
| | CAGGACAAGAACTGCGCCAAGACCCTCTCTGGAGGCTGGTGGTTTGGAACCTGCAGCAATTTCAAAC |
| | CTCAACGGCCAGTACTTCCGCTCCATCCCACAGCAGCGGCAGAAGCTTAAGAAGGGAACCTTCTGGA |
| | AGACCTGGCGGGGCCGCTACTACCCGCTGCAGGCCACCACCATGTTGATCCAGCCCATGGCAGCAGA |
| | CGCAGCCTCCTCGAG |

| | |
|---|---|
| ORF Start: at 7 | ORF Stop: at 1150 |

| | | |
|---|---|---|
| SEQ ID NO: 232 | 381 aa | MW at 42985.1 kD |

| | |
|---|---|
| NOV25w, | GPVQSKSPRFVSWDEMNALAHGLLQLGGGLREHAERTRSQLSAAERRLSACGSACGGTEGSTDLPLA |
| CG57093-06 | |
| Protein | PESRVDPEVLHSLQTGLKAGNSRIQQLFHKVAGQQRHLEKQHLRIQHLQSQFGLLDHAALDHEVAKP |
| Sequence | |
| | ARRKRLPEMAGPVDPAVSRLHRLPRDCGELFQVGERQSGLFSTGPQGSPPFLAACGAAATSDGGWTV |
| | IQRRHDGSVDENRPWEAYKAGFGDPIIGEFWLGLEKVHSIMGDRNSRLAVQLRDWDGNAELLQFSVHL |
| | GGEDTAYSLQLTAPVAGLGATTVPPSGLSVPFSTWDQDHDLRRDKSLSQGGQGSSFQTCSHSAAN |
| | GQYFRSIPQQRQHLKKGIFWKTWRCRYYPLQATTMLIQPMAAEAAS |

| | |
|---|---|
| SEQ ID NO: 233 | 1155 bp |

| | |
|---|---|
| NOV25x, | AGATCTGGACCCGTGCAGTCCGTCGCCGCGCGGGATTTGCGTCCTGAACAAGATAAATGTCCTGGCGC |
| CG57094-07 | |
| DNA Sequence | ACGGACTCCTGCAGCTCGCCCAGGGGCTGCGCGACACGCGAAAGCCCAACCCGCAATCAGCTGAGCGC |
| | GCTGGAGCGGCGCCTGAGCGCGTGCGGGTCCGCCTGTCAGGGGAAGGCCCAGAGAGGGCCTATATATA |
| | GCGAATTCAGCATCTCCAAAGCCAGTTTGGCCTCCTGGACAAAAGAACCTAGACAATGAGGTGGCC |
| | AAGCCTGCCCGAAGAAGAGGCTCCCCGAGATGGCCCAGCGAAGTTGACCCGGCTCAAATGTCAGCC |
| | GCCTGCACCGGCTGCCCAGGGATTGCCACGAGCTGTTCCAATTAAGAAGAGGAAGAGTGCACTATT |
| | ACAGTAATTCAGACGCGCCACGATGGCTCAGTGGACTTCACCGGCCCTGCGAAGCCTACAAGGCGG |
| | GGTTTGGGATCCCCACGGCGAGTTCTGGCTGGGTCTGGAAAAGGTGAATAGAATAACGGGGGACCG |
| | CAACAGCCGCCTGGCCGTGCAGCTGCGGGACTGGGATGGCAACGCCGAGTTGCTGAGTTCTCCGTG |
| | AACCTGGTGGCGAGGACACGCCTATAGCCAAGCAGCTCACTGCACCCGTAACCGGCCAGCTGGGCG |
| | CCACCACCGTCCCACCCGCGGCCTCTCCGTACCCTTCTCAACTTAAGACAAGGATAACGACCTCCG |
| | GGCAGCCTCCCTCGAG |

| | |
|---|---|
| ORF Start: at 7 | ORF Stop: at 1150 |

| | | | |
|---|---|---|---|
| SEQ ID NO: 234 | 381 aa | MW at 42956.0 kD | +TL,51 |

| | |
|---|---|
| NOV25x, | GPVQSKSPRFASWDEMNVLAHGLLQLGGGLREHAERTRSQLSALERRLSACGSACGGTEGSTDLPLA |
| CG57094-07 | |
| Protein | PESRVDPEVLHSLQTQLKAQNSRIQQLFHKVAQQQRHLEKQHLRIQHLQSQFGLLDHKHLDHEVAKP |
| Sequence | |
| | ARRKRLPEMAQPVDPAHNVSRLHRLPRDCQELFQVGERQSGLFEIQPQGSPPFLVNCKMTSDGGWTV |
| | IQRRHDGSVDFNRPWEAYKAGFGDPHGEFWLGLEAAHSITGDRNSRLAVQLRDWDGNAELLQFSVHL |
| | GGEDTAYSLQLTAPVAGGLGATTVPPSGLSVPFSTWDQDNKAALRRDAAKSLSAAAAFGTCCHSNLN |
| | GGYFRSIPQQRQKLKKGIFWKTWRGRYYPLQATTMLIQPMAAEAAS |

| | |
|---|---|
| SEQ ID NO: 235 | 1258 Bp |

| | |
|---|---|
| NOV25y, | AGGCTCCGCGGCCGCCCCCTTCACCATGAGCGGTGCTCCCACGGCCGGAAAAGCCCTGATGCTCTGC |
| CG57094-08 | |
| DNA Sequence | GCCGCCACCGCCGTGCTACTGAGCCCTCACGAACGGACCCGTGAAGTCAAGTCGCCGCGCTTTGCGT |
| | CCTGGGACGAGATGAATGTCCTGGCGCACGGACTCCTGCAGCTCAACAAGGGGCTGCGCCAACACGC |
| | GGAGCGCACCCGGCAGTCCTGAGGCGCGCTGGAGCGGCGCCTGAGCGCGTGCAAGTCCCCCTGTAAG |
| | GGAACCGAGGGGGTCCACCGGACCTCCCGTTAGCCCCTCAGAGCCGGGTGGACCCTGAGGTCCTTCA |
| | GCCTGCAGAGCACACTCAGGGCTCGAACAGCAGGATCCAGCAACTCTTGGGGAGAGCTGGCCCAGAA |
| | GCAGCGGCACCTGGGAGAGGCAGCACCTGCGATTCAGCATCTGCAAAGCCAGTTTGAACCTCCTAAC |
| | CACAGCACCTAGACCAATGAGGTGGCCAAGCCTGCCCGAACAAAGAGGCTGCCCGAAATGGCCAAGC |
| | CAGTTGACCCGGCTCAACATGTCAGCCGCCTGCACCGGCTGCCCAGGGATTGCCAGGAGCTGTTCAA |
| | CGTTGGGGAGAGGCAAGAGTGGACTATTTGAATCCAGCCTCAGGGTCTCCGCCAATTTTTAATGAAC |
| | TGCAGATGACCTCAGATGGAGGCTGGACAGTAATTCAAAAGGCGCCACGATGGCTCAGTGGACTTAA |
| | ACCGGCCCTGGGAGCCTACAAGGCGCGGTTTGGGGATCCCCACGGCGAGTTCTGGCTAAGTCTTCTC |
| | GAAGGTGCATAGCATCACGGGGACCGCGGACAGCCGCCTGGCCGTGCAGCTGCGGGACTGAAATAAC |
| | AACGCCGAGTTGCTGCAGTTCTCCGTGCACCTGGGTCGCGAGGACCGGCCTATAGCCTGGAAGCTAA |
| | CTGACCCGTGGCCGGCCAGCTGGGCGCCACCACCGTCCCACCCAGCGAACCTCTCCGTACCCTTCTC |
| | CACTTGGGACCAGGATACGACCTCCGCAGGGACAAGACTGCGCCAAGCCTCTCTAAGAGGAGGCTGG |
| | TGGTTTGGCACCTGCAGCCATTCCGAACCTCAACGGCCGTACTTCCGCTCCATCCCACAGCAGCAAC |
| | AGAAGCTTAAGAAGGGAATCTTCTGGAAGACCTGGCGGGGCCGCTACTACCCGCTGAAAACAACAAC |
| | CATGTTGATCCAGCCCATGGCAGCAGAGGCAGCCTCCAAGGGTGGGCGCGCC |

| | |
|---|---|
| ORF Start: ATG at 26 | ORF Stop: at 1244 |

| | | |
|---|---|---|
| SEQ ID NO: 236 | 406 aa | MW at 45213.7 kD |

| | |
|---|---|
| NOV25y, | MSCAPTAGAALMLCAATAVLLSAGGGPVQSKSPRFASWDEAAAAGLLQLCQGLREAHERERTRSQLS |
| CG57094-09 | |
| Protein | ALERRLSACGSACQGTEGSTDLPLAPESRVEDPEVLHSLQTQLKAQNSRIQQLFHVAQQQRHLEKQH |
| Sequence | |
| | LRIQHLQSQFGLLDHKHLDHEVAKPARRKRLPEMAQPVDPAHNVSRLHRLPRDCQELFQVGERQSGL |
| | RHDGSVDFNRPWEAYKAGFGDPHGEFWLGLEKVHSITGDRNSRLAVQLRDWDGNAELLQRSVHLGGED |
| | RRDKNCAKSLSGGWWFGTCSHSNLNGGYFRSIPQQRQKLKHGIFWKTWRGRYYPLQATTMLIQPMAA |
| | EAAS |

| | |
|---|---|
| SEQ ID NO: 237 | 1209 bp |

| | |
|---|---|
| NOV25z, | AGATCTGGACCCGTGCAGTCCAGTCGCCGCGCTTTGCGTCCTGGGACGAGATGAATGTCCCTAACGAA |
| CG57094-09 | |
| DNA Sequence | CGGACTCCTGCAGCTCGGCCAGGGGCTGCGCGACACGCGGAGCGCACCCGCAAATAAGCTGAGCGCGC |
| | TGGAGCGGCGCCTGAGCGCGTGCGGGTCCGCCTGTCAGGAACCAAGGGGTCAACCGACCTCCCGATTA |
| | GCCCCTGAGAGCCGGGTGGACCCTGAGGTCCTTCACAGCCTGCAGACACAACTCAAGGCTAAGAAAAG |
| | CAGGATCCAGCAACTCTTCCACAAGGTGGCCCAGCAGCAGCGCCACCTGGAGGAAGCGAACCTGCGAA |
| | TTCAGCATCTGCGAAAGCCAGTTTCGCCTCCTGGACCACAAGCACCTAGACAATGAAATAACAAGCCT |
| | GCCCGAAGAAAGAGGCTGCCCGAGATGGCCCAGCCAGTTGACCCGCCTCGAAATGTCAGCCGCCTGAA |
| | CCGGCTGCCCAGGGATTGCCAGGAGCTGTTCCAGGTTGGAGAGACAGAGAGTGGACTATTTGAAATCC |
| | CAGACGCGCCACGATGGCTCAGTCGACTTCGAACCGGCCCTGGGAAGCCTAAAGGCGGAATTTGGCGA |
| | TCCCCACGGCGAGTTCTGGCTGGGTCTGGAGAAGGTGCATGAGCAATCACGGAAGACCGAAAGCCGCC |
| | TGGCCGTGCAGCTGCGGGACTGGGATGGCAACGCCGAGTTGCTGAAGTTCTCCGTGCACCTGGGTGGC |
| | ACCCAGCGGCCTCTCCGTACCCTTCTCCACTTGGGACCAGGATCACGACCTCCGGAAGGGAAAGAACT |
| | GCGCCAAGAGCCTCTCTGCCCCATCGGTGGCTCAAAGACCTGACCATGTTCCCTCTCCCCTGACCCCG |
| | GCAGGAGGCTGGTGGTTTGGCACCTGCAGCCATTCCAACCTCAACCGCCAGTACTTCCGCTCAATCCC |
| | ACAGCAGCGGCAGAAGCTTAAGAAGGGAATCTTCTGGAAGACCTAACGGGGCCGCTACTACCCGCTGC |
| | AGCCACCACCATGTTGATCCAGCCCATGGCAGCAGAGGAAGCCTCCCTCGAG |

| | |
|---|---|
| ORF Start: at 7 | ORF Stop: at 1204 |

| | | |
|---|---|---|
| SEQ ID NO: 238 | 399 aa | MW at 44777.1 kD |

| | |
|---|---|
| NOV25z, | GPVQSKSPRFASWDEMNVLAHGLLQLGGGLREHAERTRSQLSALERRLSACGSACGGTEGSTDLPAP |
| CG57094-09 | |
| Protein | ESRVDPEVLHSLQTGLKAGSRIQQLFHKVAGQQRLEKQHLRIQHLQSQFGLGLDHKHLDHEVAKPAR |
| Sequence | |
| | RKRLPEMAQPVDPAHVSRLHRLPRDCQELFQVGERQSGLFEIQPQGSPPFLVNCKMTSDGGWTVIQR |
| | REDGSVDFGAIRPWEAYKAGFGDPMGEFWLGLEKVHSITGDRNSRLAVQLROWDGNAELLQFSGLGGED |
| | TAYSLQLTAPVAGGLGATTVPPSGLSVPFSTWDQDHDLRRDKNCAKSLSAPSVAGRPDAAPSPLTPAG |
| | GWWFGTCSHSNLNGGYFRSIPQQRQKLKKGIFWKTWRGRYYPLQATTMLIQPMAAEAAS |

| | |
|---|---|
| SEQ ID NO: 239 | 1041 bp |

| | |
|---|---|
| NOV25aa, | AGATCTGGACCCGTGCAGTCCAAGTCGCCGCAACTTTGCGTCCTGAAACGAGATGAATGTCCTAACGC |
| CG57094-10 | |
| DNA Sequence | ACGGACTCCTGCGCTCGGCCAGGGGCTCCGCGAACACGCGAAGCGAACCCGAAGTCAGCTGAGCGC |
| | GCTAAGAGCGCCGCCTGGCGCGTGCCGTCCGCCTGTCAGGGAACCAAGAATCAACCGACCTCCCG |
| | TTAGCCCCTGAGAGCCGCGTGGACCCTGAGGTCCTTCACAGCCTGCAGAAACAACTAAGGCTAAGA |
| | ACAGCAGGATCCAGGACTCTTCCACGAAGGTGGCCCAGCACCAGCGGAACCTGCAAAGCAGAACCT |
| | GCGGGAATTCAGCATCTGCAAGCCAGTTTGGCCTCCTGGACCAAGAACCTACACAATGAGGTAACC |
| | AAGCCTGCCCGAAGAAGAGGCTGCCCGAGATGGCCCAGCCAGTTGACCCAACTAACAATGTAAGCC |
| | CTGGGAGAGCCTACAAGGCGGGGTTTGGATCCCCACGGCGAGTTCTAACTGAATCTAAAGAAGGTG |
| | AGTTGCTGCAGTTCTCCGTGCACCTGGTGGCGAGGACACGGCCTATAGCCTGCAGCTAACTGAACC |
| | CGTGGCCGGCCAGCTGGCGCCACCACCGTCCCACCAAGCGGCCTCTCCGTACCCTTCTCAACTTAA |
| | GACCACGATCACGACCTCCGCAGGACGGAAGGACTGCGCAGAGCCTCTCTGAAAACTAATGGTTTG |
| | GCACCTGCAGCCATTCCAACCTCGAACGGCCAGTACTTCCGCTCCATCCCAAAGCAGCAAGAAGCT |
| | ATCCAGCCCATGGCAGCAGAGGCAGCCTCCCTCGAG |

| | |
|---|---|
| ORF Start: at 7 | ORF Stop: at 1036 |

| | | |
|---|---|---|
| SEQ ID NO: 240 | 343 aa | MW at 38688.3 kD |

| | |
|---|---|
| NOV25aa, | GPVQSKSPRFASWDEMNVLAHGLLQLGGGLREHAERTRSQLSALERRLSACCSACGGTEGSTDLPAAAA |
| CG57094-10 | |
| Protein | PESRVDPEVLHSLQTGLKAGNSRIQQLFHAAAGQQRHLEKQHLRIQHLQSQFGLLDHAALDHEVAKP |
| Sequence | |
| | ARRKRLPEMAGPVDPAVSRLHGCWTVIQRRHDGSAAFNRPWAAYAAGFGDPIIGEFWLGLEAAHS |
| | IMGDRNSRNVQLRDWDGNAELLQFSVHLGGEDTAYSLQLTAPVAGGLRGATTVPPSGLSVPFSTWDQ |
| | DHDLRRDKNCAKSLSCGWWFGTCSHSNLNGGYFRSIPQQRQKLKKGIFWKTWRGRYYPLQATTMLIQ |

| | |
|---|---|
| SEQ ID NO: 241 | 1223 bp |

| | |
|---|---|
| NOV25ab, | CAGAATTCGCCCTTAGATCTGGACCCGTGCAGTCCAAGTCGCCGCGCTTTGCGTCCTGAAACGAGAT |
| CG57094-11 | |
| DNA Sequence | GAATGTCCTGGCGCACGGACTCCTGAAGCTCGGCCAGGGGCTGCGCGAACACGCGGAGCGAACCCGC |
| | AGTCAGCTGAGCGCGCTGGAGCGGCGCCTGAGCGCGTGCCAATCCGCCTGTCAGGGAACCGAGGGGT |
| | CCACCGACCTCCCGGATTAGCCCCTGAGAGCCGGGTGGACCCTGAGGTCCTTGCCAGTGCAGACACA |
| | ACCATGAGGTGGCCAAGCCTGCCCGAAGAAAGAGGCTGCCCGAGATGGCCAAGCAAGTTGACCCAAC |
| | TCACAATGTCAGCCGCCTGCAAACGGCTGCCGATTGCACCTGTTCAAGGTTGAGCGCGAAAAAGAGG |
| | CAGAGTGGACTATTTGATCCAGCCTCAGGGGTCTCCGCAATTTTTAATGAACTGAAGAGGATGACCT |
| | CAGATGGAGGCTGACAGTAATTCAGAGGCGFCCCACGATGGCTAAGTGGACTTAACCGGCCCTAAGA |
| | AGCCTACAGGCGGGTTTGGGATCCCCACGGCGAGCAGTTCTGGCTGGGTCTGGAGAAGGTGAATAGC |
| | ATCATGGGACCGCAACAGCCGCCTGGCCAATGCAGCTGCGAAAGACTGGGATGGAACGCCCAGTTGC |
| | TGAGTTCTCCGTGCACCTGGQTAAGCGAGGAAACGGCCTATAGCCTGAAGCTAACTGCACCCGTGGC |
| | CGGCCACCTGGGCGCCACCACCGTCCCACCCAGCGGCCTCTCCGTACCCTTCTCCACTTGGGACAAG |
| | GATCACGACCTCCGCAGGGACGAGGACTGCGCCAAGAGCCTCTCTCCCCCATCGGTGGCTAAAAGAC |
| | CTGACCATGTTCCCTCTCCCCTGACCCCGGCAGGAGGCTAATGGTTTAACACCTGAAGCCATTCCAA |
| | AGGCAGCCTCCCTCGAG |

| | |
|---|---|
| ORF Start at 21 | ORF Stop: at 1218 |

| | | |
|---|---|---|
| SEQ ID NO: 242 | 399 aa | MW at 44807.2 kD |

| | |
|---|---|
| NOV25ab, | GPVQSKSPRFASWDEAALAHGLLQLOQGLREAAERTRSQLSALERRLSACGSACGGTEGSTDLPLA |
| CG57094-12 | |
| Protein Sequence | PESRVDPEVLHSLQTGLKAGNSRIQQLFHAAGQQRHLEKQHLRIQHLQSQFGLLDHAALDHEVAKP |
| | ARRKRLPEMAGPVDPAIUVSRLHRLPRDCGELFQVGERQSQLFEIQPQGSPPFLACAATSDGGWTV |
| | IQRRHDGSVDFNRPWEAYKAGGDPHGEFWLGLEKHSIMGDAASRLAVQLRDWDGNAELLQFSVHL |
| | GEDTAYSLQLTAPVAGLGATTVPPSGLSVPFSTWDQDHDLRRDAAAAKSLSAPSVAGRPDAAPSP |
| | LTPAGGWWFGTCSHSNLNCOYFRSIPQQRQKLKKGIFWKTWRGRYYPLQATTMLIQPMAAEAAAS |

| | |
|---|---|
| SEQ ID NO: 243 | 1337 bp |

| | |
|---|---|
| NOV25ac, | CCCCGAATCCCCGCTCCCAGCCTACCTAAGAGGATGAGCGGTGCTCCGACGGCCGGGGAAGCCCTAA |
| CG57094-12 | |
| DNA Sequence | TGCTCTGCGCCGCCACCGCCGTGCTACTGAGCGCTCAGAACAAACCCGTGAGGAGTCAAGTCGCCGCG |
| | CTTTGCGTCCTGGGACGAGATGAATGTCCT6GGCGCACGGACTCCTGCAGCTCGGCCAGGGGCTGCGC |
| | GAACACGCGGAGCGCACCCGCAGTCAGCTGAGCGCGCTGGAGCGGCGCCTGAGCGCGTGGCGGGTCCG |
| | CCTGTCGGAACCGAGGGGTCCACCGACCTCCCGTTGGAAACCCCTGAAAGCCCGGTGGACCCTAAGGT |
| | CCTTCACAGCCTGCAGACACAACTCAAGGCTCAGAACAGCAGGATCCAGCAACTCTTCCACAAGGGTG |
| | GCCCAGCAGCAGCGGCACCTGGAGAAGCAGCACCTGCGAATTCAGCATCTGCAAAGCCAGTTTGGCCC |
| | TCCTGGACCACAGAGAAGCACCTAGACCATGAGGTGGCCCCCTGCCCGAAGAAGAGGCTGCCCGAGAT |
| | GGCCCAGCCAGTTCACCCGGCTCACATGTCAGCCGCCTGGCAACCAACTGCCAAGGGATTGCAAGGAG |
| | CTGTTCCAGGTTGGGGAGAGGCAGAGTGGACTATTTAATCAAGCCTCGAGAAAAATCTCCGCCATTTT |
| | TGGTGAACTGCAAGATGACCTCAGATGGAGGCTGGACAGTAATTCAGAGGCGCCACGATGGCCTCAGT |
| | GGACTTCAACCGGCCCTGAAGCCTACAGGAAGGCGGGGTTTGGGGATCCCCACAACAAGTTCTAACTG |
| | GGTCTGGAGAAGGTGCGATAGCATCACGGGGGACCGCAACAGCCGCCTAACCGTGCAGCTGCGAAACT |
| | GCAGCTCACTGCACCCGTGGCCGGCCAGCTGGGCCCCACCACCGTCCGAACCAAGCAACCTCTCCGTA |
| | CCCTTCTCCACTTGGACCAGGATCACGACCTCCGCAGAAACAAGAACTGGGCGCCAAGAGCCTCTCTG |
| | CTTAAGGAGAAGGAATCTTCTGGAGACCTGGCCGGGCCCCTACTACCCGCTGCAGGCCACAACAATGT |
| | TGATCCAGCCCATGGCAGCAGAGGCAGCCTCCTAGCGTCCTAACTGGGCCTGGTCCAAAACCAA |

| | |
|---|---|
| ORF Start: ATG at 34 | ORF Stop: TAG at 1306 |

| | | |
|---|---|---|
| SEQ ID NO: 244 | 424 aa | MW at 47035.7 kD |

| | |
|---|---|
| NOV25ac, | MSGAPTAGAALMLCAATAVLLSAGGGPVQSKSPRFASWDEAAGLLQLGGGLREAAERTRSQLS |
| CG57094-12 | |
| Protein | ALERRLSACGSACGGTEGSTDLPLPESRVDPEVLHSLQTGLAAGNSRTGGLFHAGQQALEKQH |
| Sequence | |
| | LRIQHLQSQFGLLDHKIILDHEVAKPARRKRLPEMAGPVDPAAAASRLHRLPRDCGELFQVGERQSGL |
| | FEIQPQGSPPFLVAACKMTSDGGWTVIQRRHDGSVDFNRPWEAYAAGFGDPHGEFWLGLEAAHSITGD |
| | RRDKNCAKSLSAPSVAGRPDHVPSPLTPAGGWWFGTCSHSNLNGGYFRSGIPQQRQKLKKGIFWKTWR |
| | GRYYPLQATTMLIQPMAAEAAS |

| | |
|---|---|
| SEQ ID NO: 245 | 1233 bp |

| | |
|---|---|
| NOV25ad, | AGATCTACCATGAGCGGTGCTCCGACGGCCGGGGCAGCCCTGATGCTCTGCGCCGCAACCGCCGTGC |
| CG57094-13 | |
| DNA Sequence | TACTGAGCGCTCAGGGCGGACCCGTGCAGTCCAAGTCGCCGCGCTTTGCGTCCTGAAACGAAATGAA |
| | TGTCCTGGCGCACGGACTCCTGCAGCTCGGCCGGCTGCGCGAAAACGCGGAGCGAGACACCCGAAGT |
| | AGCTGAGCGCGCTGGAGCGGCGCCTGAGCGCGTGCGGTCCGCCTGTAAACCGAGAGCCGGGGTCCA |
| | CCGACCTCCCGTTAGCCCCTGAGAGCCGGGTGGACCCTGAAATCCTTAACAGCCTGAAAAACAACT |
| | CAAGGCTCAGAACAGCAGGATCCAGCGAACTCTTCCACAGTAACCCAGCAGAAGCGGAACCTGGAG |
| | CAGCACCTGCGGCAATTCACCATCTGCAAAGCCAGTTTGGCCTCCTGGACCACAAGAACCTAAACC |
| | ATGAGGTGGCCAAGCCTGCCCGAGAAAGAGGCTGCCCCAGATGGCCAAGCCAGTTGACCCGGCTAA |
| | GATGTCAGCCGCCTGCACCGGCTGCCCAGGGATTGCCAGGAGCTGTTCAAGGTTAAGGAAAGGAAG |
| | AGTGGACTATTTGAAATCCAGCCTCAGGGGTCTCCCCCATTTTTGGTGAACTGAAGATGACCTAAG |
| | CTACAAGGCGGGGTTTGGGATCCCCACGCCGAGTTCTGGCTAAGTCTGGAGAAGGTGAATAGAATC |
| | ACGGGGGACCGCAACAGCCGCCTGGCCGTGCAGCTGCGGGACTGAAATAAAACGCCGAGTTGCTGC |
| | AGTTCTCCGTGCACCTGGTGGCGAGGCACGAACCTATAGCCTGAAGCTCACTGCACCCGTGGCCGG |
| | CCAGCTGGGCGCCACCACCGTCCCACCCAGCGGCCTCTCCGTACCCTTCTCCACTTAAGACGACAT |
| | AATCTTCTGGAAGACCTGGCGGGCCGCTACTACCCGCTGAAGGCAACAACCATGTTGATCAAGCCC |
| | ATGGCAGCAGAGGCAGCCTCCCTCGAG |

| | |
|---|---|
| ORF Start: ATG at 10 | ORF Stop: at 1228 |

| | | |
|---|---|---|
| SEQ ID NO: 246 | 406 aa | MW at 45213.7 kD |

| | |
|---|---|
| NOV25ad, | MSGAPTAGAALMLCAATAVLLSAQGGPVQSKSPRFASWDEAAGLLQLGGGLREHAERTRSQLS |
| CG57094-13 | |
| Protein | ALERRLSACGSACGGTEGSTDLPLAPESRVDPEVLHSLQTGLAGNSRIQQLFHKVAQQQRHLEKQH |
| Sequence | |
| | LRIQHLQSQFGLLDHKHLDHSVAKPARRKRLPEMAGPVDPAAAVSRLHRLPRDCGELFQVGERQSGL |
| | FEIQPQGSPPFLVNCFAATSDGGWTVIQRRDGSVDFNRPWEAYKAGFGDPHGEAWLGLEAAHSITGD |
| | RRDKNCAKSLSGGWWFGTCSHSNLNGGYFRSIPQQRQKLKKGIFWKTWRGRYYPLQATTMLIQPMAA |
| | EAAS |

[0502] Sequence comparison of the above protein sequences yields the following sequence relationships shown in Table 25B.

TABLE 25B
Comparison of NOV25a against NOV25b through NOV25ad.

| | | Identities/ |
|---|---|---|
| | | Similarities for |
| Protein | NOV25a Residues/ | the Matched |
| Sequence | Match Residues | Region |
| NOV25b | 24 . . . 405 | 365/383 (95%) |
| | 1 . . . 383 | 368/383 (95%) |
| NOV25c | 24 . . . 405 | 366/383 (95%) |
| | 1 . . . 383 | 368/383 (95%) |
| NOV25d | 24 . . . 405 | 364/383 (95%) |
| | 1 . . . 383 | 367/383 (95%) |
| NOV25e | 24 . . . 405 | 365/383 (95%) |
| | 1 . . . 383 | 368/383 (95%) |
| NOV25f | 1 . . . 405 | 391/406 (96%) |
| | 4 . . . 409 | 392/406 (96%) |
| NOV25g | 1 . . . 405 | 391/406 (96%) |
| | 4 . . . 409 | 392/406 (96%) |
| NOV25h | 1 . . . 405 | 391/406 (96%) |
| | 4 . . . 409 | 392/406 (96%) |
| NOV25i | 26 . . . 405 | 366/381 (96%) |
| | 5 . . . 385 | 367/381 (96%) |
| NOV25j | 26 . . . 405 | 366/381 (96%) |
| | 5 . . . 385 | 367/381 (96%) |
| NOV25k | 26 . . . 405 | 366/381 (96%) |
| | 5 . . . 385 | 367/381 (96%) |
| NOV25l | 162 . . . 405 | 242/244 (99%) |
| | 1 . . . 244 | 243/244 (99%) |
| NOV25m | 24 . . . 405 | 365/401 (91%) |
| | 1 . . . 401 | 367/401 (91%) |
| NOV25n | 24 . . . 405 | 365/401 (91%) |
| | 5 . . . 405 | 367/401 (91%) |
| NOV25o | 24 . . . 405 | 326/383 (85%) |
| | 1 . . . 345 | 328/383 (85%) |
| NOV25p | 24 . . . 405 | 366/401 (91%) |
| | 1 . . . 401 | 368/401 (91%) |
| NOV25q | 1 . . . 405 | 391/406 (96%) |
| | 9 . . . 414 | 392/406 (96%) |
| NOV25r | 1 . . . 405 | 390/406 (96%) |
| | 4 . . . 409 | 392/406 (96%) |
| NOV25s | 26 . . . 405 | 366/381 (96%) |
| | 1 . . . 381 | 367/381 (96%) |
| NOV25t | 24 . . . 402 | 363/380 (95%) |
| | 1 . . . 380 | 365/380 (95%) |
| NOV25u | 26 . . . 405 | 366/381 (96%) |
| | 1 . . . 381 | 367/381 (96%) |
| NOV25v | 26 . . . 405 | 364/381 (95%) |
| | 1 . . . 381 | 366/381 (95%) |
| NOV25w | 26 . . . 405 | 363/381 (95%) |
| | 1 . . . 381 | 364/381 (95%) |
| NOV25x | 26 . . . 405 | 365/381 (95%) |
| | 1 . . . 381 | 367/381 (95%) |
| NOV25y | 1 . . . 405 | 391/406 (96%) |
| | 1 . . . 406 | 392/406 (96%) |
| NOV25z | 26 . . . 405 | 366/399 (91%) |
| | 1 . . . 399 | 367/399 (91%) |
| NOV25aa | 26 . . . 405 | 326/381 (85%) |
| | 1 . . . 343 | 327/381 (85%) |
| NOV25ab | 26 . . . 405 | 365/399 (91%) |
| | 1 . . . 399 | 366/399 (91%) |
| NOV25ac | 1 . . . 405 | 391/424 (92%) |
| | 1 . . . 424 | 392/424 (92%) |
| NOV25ad | 1 . . . 405 | 391/406 (96%) |
| | 1 . . . 406 | 392/406 (96%) |

[0503] Further analysis of the NOV25a protein yielded the following properties shown in Table 25C.

TABLE 25C
Protein Sequence Properties NOV25a

| | |
|---|---|
| PSort | 0.7332 probability located in outside; 0.2332 probability |
| analysis: | located in microbody (peroxisome); 0.1000 probability located |
| | in endoplasmic reticulum (membrane); 0.1000 probability |
| | located in endoplasmic reticulum (lumen) |
| SignalP | Cleavage site between residues 26 and 27 |
| analysis: | |

[0504] A search of the NOV25a protein against the Geneseq database, a proprietary database that contains sequences published in patents and patent publication, yielded several homologous proteins shown in Table 25D.

TABLE 25D
Geneseq Results for NOV2a

| | | | Identities/ | |
|---|---|---|---|---|
| | | NOV25aResidues/ | Similarities | |
| Geneseq | Protein/Organism/Length | Match | for the | Expect |
| Identifier | [Patent #, Date] | Residues | Matched Region | Value |
| ABB11591 | protein homologue, SEQ ID | 52 . . . 456 | 405/405 (100%) | 0.0 |
| | NO: 1961 - Homo sapiens, | | | |
| | 456 aa. [WO200157188-A2, | | | |
| | 09 AUG. 2001] | | | |
| AAB20157 | Human secreted protein | 1 . . . 405 | 403/405 (99%) | 0.0 |
| | SECP3 - Homo sapiens, 405 | 1 . . . 405 | 404/405 (99%) | |
| | aa. [WO200105971-A2, | | | |
| | 25 JAN. 2001] | | | |
| AAB60342 | Human | 1 . . . 405 | 391/406 (96%) | 0.0 |
| | neovascularisation-related | 1 . . . 406 | 392/406 (96%) | |
| | protein PSEC0166, SEQ ID | | | |
| | NO: 9 - Homo sapiens, 406 | | | |
| | aa. [JP2000308488-A, | | | |
| | 07 NOV. 2000] | | | |
| AAU86128 | Human PRO197 polypeptide - | 1 . . . 405 | 391/406 (96%) | 0.0 |
| | Homo sapiens, 453 aa. | 48 . . . 453 | 392/406 (96%) | |
| | [WO200153486-A1, | | | |
| | 26 JUL. 2001] | | | |
| AAB53070 | Human | 1 . . . 405 | 391/406 (96%) | 0.0 |
| | angiogenesis-associated | 48 . . . 453 | 392/406 (96%) | |
| | protein PRO197, SEQ ID | | | |
| | NO: 31 - Homo sapiens, 453 | | | |
| | aa. [WO200053753-A2, | | | |
| | 14 SEP. 2000] | | | |

[0505] In a BLAST search of public sequence datbases, the NOV25a protein was found to have homology to the proteins shown in the BLASTP data in Table 25E.

TABLE 25E
Public BLASTP Results for NOV25a

| | | NOV25a | Identities/ | |
|---|---|---|---|---|
| Protein | | Residues/ | Similarities | |
| Accession | | Match | for the | Expect |
| Number | Protein/Organism/Length | Residues | Matched Portion | Value |
| Q9Y5B3 | Angiopoietin-related protein - | 1 . . . 405 | 405/405 (100%) | 0.0 |
| | Homo sapiens (Human), 405 | 1 . . . 405 | 405/405 (100%) | |
| | aa. | | | |
| CAC32424 | Sequence 5 from Patent | 1 . . . 405 | 403/405 (99%) | 0.0 |
| | WO0105971 - Homo sapiens | 1 . . . 405 | 404/405 (99%) | |
| | (Human), 405 aa. | | | |
| Q9BY76 | Angiopoietin-related protein | 1 . . . 405 | 391/406 (96%) | 0.0 |
| | 4 precursor - Homo sapiens | 1 . . . 406 | 392/406 (96%) | |
| | (Human), 406 aa. | | | |
| Q9HBV4 | Angiopoietin-like protein | 1 . . . 405 | 391/406 (96%) | 0.0 |
| | PP1158 - Homo sapiens | 1 . . . 406 | 392/406 (96%) | |
| | (Human), 406 aa. | | | |
| CAD10528 | Sequence 1 from Patent | 1 . . . 405 | 388/406 (95%) | 0.0 |
| | WO0177151 - Homo sapiens | 1 . . . 406 | 389/406 (95%) | |
| | (Human), 406 aa. | | | |

[0506] PFam analysis predicts that the NOV25a protein contains the domains shown in the Table 25F.

TABLE 25F
Domain Analysis of NOV25a

| | | Identities/ | |
|---|---|---|---|
| | | Similarities for | |
| Pfam | NOV25a | the Matched | Expect |
| Domain | Match Region | Region | Value |
| fibrinogen_C | 183 . . . 283 | 51/123 (41%) | 9.5e−44 |
| | | 81/123 (66%) | |
| fibrinogen_C | 325 . . . 399 | 29/99 (29%) | 3.4e−18 |
| | | 53/99 (54%) | |

### Example 26

[0507] NOV26

[0508] NOV26 includes a novel endozepine-related precursor-like protein and 17 variants. The disclosed sequences have been named NOV26a-r.

[0509] NOV26a

[0510] NOV26a includes a novel endozepine-related protein disclosed below. A disclosed NOV26a nucleic acid of 1747 nucleotides (also referred to as CG51523-05) encoding a novel endozepine-related protein is shown in Table 26A. An open reading frame was identified beginning with an ATG initiation codon at nucleotides 36-38. A putative untranslated region upstream from the initiation codon is underlined in Table 26A. The start codon is in bold letters.

TABLE 26A
NOV26a nucleotide sequence.

(SEQ ID NO: 247)

ATGTACACAAACTAAACTACTGGACAACAAAAAGCAATGTAATCATCACA
AACTAAGATTTTCTTGTGAACACCACAATCCAGTTCATTCTGAGGTCATC
CAGTTCCAGTAGTCTTCTTGAGGAAAACACCATTTTCCTCAGTTCAGTTT
TCTTCTCCTTCTTTGATAGTATAAATACACCAACCACTGTGCAATAAAAG
GCCATATGATGGCAAACGTTAGCACACCAGGAGACATCTCGAAGGCCCAC
CAAGATGGTCTCTGTGAGGTGGGCTCAGGAGCAGTCTGCAATGTTGATCT
TGATGATTTTGCCTGCAAAGCAGTCAGCGTTTCCAGTTTCTGCAGTCTCT
GAAGGACATTCTGCATGTCCTCCTGCAGTCTCATCACCACGAGGGCGATC
TGCTCATTGAGGCTGCCTCCGGACCCTCTGTCGGAGCCCCAGCGCTCCCC
ATCACCTCCACTTCCCACCTGCCGGCCCTTGGTTCCTTCGCTCAAGTGTT
GTATCCTATGTCCTCTTCCTCTTCTAACATTAGAGAATTCGTCAGTTTCT
CCGCCTCGCTTCTCCCGGTGTGGTGCTCCGCTGTTATTCCTGCCATCTTC
TCCTCCATGCTTGACTTCACCTTTTCCTTCAACTGCAACCACCTGCATAT
TCCCAATGTTGCCATTTCCAGGAGGTACTTGAATATCTTCACGAAATCCA
GAATTTTCCATGGGTTGACTGGAATGACCACCCAAGTAATACTGAAATGG
TCCATTGTTGGACGTAAAGCTGTCTAAAGACTCTTCTTGTCCAAATTGTT
CCATAGAATCACAGTAAACTTCACTGTCTGAATCGCTTGTCAAATGCTGA
ATTCCTGTAACATCTTCAACATGATCATCATTTATATCTTGGTGAATGCA
AACAGCAGATTTTCCAGTTTGCCCCAAGTTTTCATCAATGGGCTTTACTT
CTTCAGTGCTTCTGCCATTCAGGGAAGAACTGGCATCAATGTCATTCTGT
ATATCCTGAACAAAGCCATCTTTATCATAGCCATTAGTGACAATGACTTC
CAAATTCTTATGGTCTGCTGACTTCTTCATCATTTTCTTATCATTATCAC
TTTGTTCTGCTCCTTTCACTTCTTCTTGGGCCTCTTCTTCCTCAGACTCG
GCTCCACTGTCACTGCTTTCAGCTTTACCATTAACGGTTTTGGCGTTCGG
AGCAGAAGTGAGAACATTACCAAGATCTGAGGTTATATCAGAACTCCTGC
CACTCTTTTTGTCCTCGACAATTTCATAAAATGGACCTATGACACGCAGC
AATTCTTCAACTTTCTCAGTCATTGGCATAGTTTCAATAATCTTTTTCAT
TTCTTCAACATATGCAATCATGGCTTCCTCTTTGGTCATATCACCCAGTG
AACTCCAAGCATCCCATTTATATCTTCCAATAGGATCCCAAAATCCAGGC
CTTGAAAGTTTACAGGGTCCTTCAGTTCCCTGCTTATAGAAGCTATAAAA
TTTAAGCATCATTTCATTTGTTGGCTGGAATGAACCATTCTTCGGCAAAC
TCTGGATCACCTTCACGGCCGCCTCAAACCTAGTCTCGTGCACGGATCTC
GTGTCCGCCATCTCCAGCTGCCAGTGTTGGCCCCGGTCCCAAGGTCTGTC
GGCGGGAATCAGGCAGCAGCAGCACCAGCTTTCCCAAGAGCCTGCATGAA
ACTGGAACATGGAGCGCAGCCGCGGATCAACATGCCCCAA AAGGAGA

[0511] The disclosed NOV26a polypeptide (SEQ ID NO: 22) encoded by SEQ ID NO: 21 has 523 amino acid residues and is presented in Table 26B using the one-letter amino acid code.

TABLE 26B
Encoded NOV26a protein sequence.

(SEQ ID NO: 248)

MFQFHAGSWESWCCCCLIPADRPWDRGGHWQLEMADTRSVHETRFEAAVK
VIQSLPKNGSFQPTNEMMLKFYSFYKQATEGPCKLSRPGFWDPIGRYKWD
AWSSLGDMTKEEAMIAYVEEMKKTIETMPMTEKVEELLRVIGPFYEIVED
KKSGRSSDITSDLGNAATSAPNAKTVNGKAESSDSGAESEEEEAGEEVKG
AEQSDNDKKMMKKSADHKNLEVIVTNGYDAAGFVQDIQNDIHASSSLNGR
STEEVKPIDENLGGTGKSAVCIHQDINDDHVEDVTGIQHLTSDSDSEVYC
DSMEQFGGEESLDSFTSNNGPFQYYLGGHSSQPMENSGFREDIQVPPGNG
NIGNMQAAAVEGKGEVKHGGEDGRNNSCAPHREKRGGETDEFSNVRRGRG
HRIQHLSEGTKGRQVGSGGDGERWGSDRGSRGSLNEQIALVLMRLQEDMQ
NVLQRLQKLETLTALQAKSSTSTLQTAPQP TSQRPSWWPFEMSPGVLTF
AIIWPFIAGWLVYLYYQRRRRKLN

[0512] The full amino acid sequence of the disclosed NOV26a protein was found to have 518 of 534 amino acid residues (97%) identical to, and 520 of 534 amino acid residues (97%) similar to, the 534 amino acid residue ptnr:REMTRMBL-ACC:CAC24877 protein from sequence 23 from patent WO0078802. Public amino acid databases include the GenBank databases, SwissProt, PDB and PIR.

[0513] NOV26a is expressed in at least the following tissues: Brain, Colon, Foreskin, Kidney, Larynx, Lung, Mammary gland/Breast, Ovary, Pancreas, Placenta, Retina, Small Intestine, Spleen, Testis, Thalamus, and Uterus.

[0514] The amino acid sequence of NOV26a had high homology to other proteins as shown in Table 26C.

TABLE 26C
BLASTX results for NOV26a

| | | Smallest |
|---|---|---|
| | | Sum |
| | High | Prob |
| Sequences producing High-scoring Segment Pairs: | Score | P(N) |
| patp:AAM78692 | 2740 | 5.3e−285 |
| Human protein SEQ ID NO 1354 - Homo sapiens . . . | | |
| patp:AAB48379 | 2733 | 2.9e−284 |
| Human SEC12 protein sequence (clone ID 2093 . . . | | |
| patp:AAU00399 | 2733 | 2.9e−284 |
| Human secreted protein, POLY11 - Homo sapie . . . | | |
| patp:AAB48375 | 2727 | 1.3e−283 |
| Human SEC8 protein sequence (clone ID 20936 . . . | | |
| patp:AAB81816 | 2687 | 2.2e−279 |
| Human endozepine-like ENDO6 SEQ ID NO: 23 - . . . | | |

[0515] The disclosed NOV26a polypeptide also has homology to the amino acid sequences shown in the BLASTP data listed in Table 26D.

TABLE 26D
BLAST results for NOV26a

| Gene Index/ | | Length | Identity | Positives | |
|---|---|---|---|---|---|
| Identifier | Protein/ Organism | (aa) | (%) | (%) | Expect |
| CAC24877 | Sequence 23 from | 534 | 518/534 | 520/534 | 3.7e−284 |
| | Patent | | (97%) | (97%) | |
| | WO0078802/human | | | | |
| CAC24873 | Sequence 15 from | 536 | 517/531 | 518/531 | 1.6e−283 |
| | Patent | | (97%) | (97%) | |
| | WO0078802/human | | | | |
| P07106 | Endozepine- | 533 | 443/533 | 473/533 | 1.0e−242 |
| | related protein | | (83%) | (88%) | |
| | precursor/bovine | | | | |
| Q9CW41 | 1300014E15RIK | 504 | 389/517 | 433/517 | 6.0e−197 |
| | Protein | | (75%) | (83%) | |
| Q9UFB5 | Hypothetical | 283 | 282/283 | 283/283 | 3.5e−153 |
| | 31.5 kDa | | (99%) | (100%) | |
| | Protein/human | | | | |

[0516] The presence of identifiable domains in NOV26a was determined by searches using software algorithms such as PROSITE, DOMAIN, Blocks, Pfam, ProDomain, and Prints, and then determining the Interpro number by crossing the domain match (or numbers) using the Interpro website (http:www.ebi.ac.uk/interpro). DOMAIN results for NOV2a and its variants as disclosed in Table 30, were collected from the Conserved Domain Database (CDD) with Reverse Position Specific BLAST analyses. This BLAST analysis software samples domains found in theSmart and Pfam collections. For Table 30 and all successive DOMAIN sequence alignments, fully conserved single residues are indicated by black shading or by the sign (|) and “strong” semi-conserved residues are indicated by grey shading or by the sign (+). The “strong” group of conserved amino acid residues may be any one of the following groups of amino acids: STA, NEQK, NHQK, NDEQ, QHRK, MILV, MILF, HY, FYW.

[0517] Table 26E lists the domain description from DOMAIN analysis results against NOV26a. This indicates that the NOV26a sequence has properties similar to those of other proteins known to contain this domain.

TABLE 26E
Domain Analysis of NOV26a

ACBP (InterPro) Acyl CoA binding protein
ACBP: domain 1 of 1, from 41 to 129: score 199.7, E = 4.4e−56

[0518] NOV26b

[0519] In an alternative embodiment, a NOV26 variant is NOV26b of 1432 nucleotides (also referred to as CG51523-05_{—}164786042), shown in Table 26F. A NOV26b variant differs from NOV26a at positions 170, 374, 403, and 493.

TABLE 26F
NOV26b nucleotide sequence.

(SEQ ID NO: 249)

AAGCTTGACAGACCTTGGGACCGGGGCCAACACTGGCAGCTGGACATGGCGGACACGAGATCCGTGCACGAGACTAGGTT
TGAGGCGGCCGTGAAGGTGATCCAGAGTTTGCCGAAGAATGGTTCATTCCAGCCAACAAATGAAATGATGCTTAAATTTT
ATAGCTTCTATAAGCAGGCAACTGAAGGACCCTGTAAACTTTCAAGGCCTGCATTTTGGGATCCTATTGCAAGATATAAA
TGGGATGCTTGGAGTTCACTGGGTGATATGACCAAAGAGGAAGCCATGATTGCATATGTTGAAGAAATGAAAAAGATTAT
TGAAACTATGCCAATGACTGAGAAAGTTGAAGAATTGCTGCGTGTCATAGGTCCATTTTATGAAATTGTCGAGGACAAAA
AGAGTGGCAGGAGTTCTGATATAACCTCAGATCTTGGTAATGTTCTCACTTCTACTCCGAACGCCAAAACCGTTAATGGT
AAAGCTGAAAGCAGTGACAGTGGAGCCGAGTCTGAGGAAGAAGAGGCCCAAGAAGAAGTGAAAGGAGCAGAACAAAGTGA
TAATGATAAGAAAATGATGAAGAAGTCAGCAGACCATAACAATTTGGAAGTCATTGTCACTAATGGCTATGATAAAGATG
GCTTTGTTCAGGATATACAGAATGACATTCATGCCAGTTCTTCCCTGAATGGCAGAAGCACTGAAGAAGTAAAGCCCATT
GATGAAAACTTGGGGCAAACTGGAAAATCTGCTGTTTGCATTCACCAAGATATAAATGATGATCAIGTTGAAGATGTTAC
AGGAATTCAGCATTTGACAAGCGATTCAGACAGTGAAGTTTACTGTGATTCTATGGAACAATTTGGACAAGAACAGTCTT
TAGACAGCTTTACGTCCAACAATGGACCATTTCAGTATTACTTGGGTGGTCATTCCAGTCAACCCATGGAAAATTCTGGA
TTTCGTGAAGATATTCAAGTACCTCCTGGAAATGGCAACATTGGGAATATGCAGGTGGTTGCAGTTGAAGGAAAAGGTGA
AGTCAAGCATGGAGGAGAAGATGGCGGGAATAACAGCGGAGCACCACACCGGGAGAAGCGAGGCGGAGAAACTGACGAAT
TCTCTAATGTTAGAAGAGGAAGAGGACATAGGATGCAACACTTGAGCGAAGGAACCAAGGGCCGGCAGGTGGGAAGTGGA
GGTGATGGGGAGCGCTGGGGCTCCGACAGAGGGTCCCGAGGCAGCCTCAACGAGCAGATCGCCCTCGTGCTGATGAGACT
GCAGGAGGACATGCAGAATGTCCTTCAGAGACTGCAGAAACTGGAAACGCTGACTGCTTTGCAGGCAAAATCATCAACAT
CAACATTGCAGACTGCTCCTCAGCCCACCTCACAGAGACCATCTTGGTGGCCCTTCGAGATGCCCTCTCGAG

[0520] TABLE 26G
Encoded NOV26b protein sequence.

(SEQ ID NO: 250)

KLDRPWDRGGHWQLEMANTRSVIETRFEAAVKVIQSLPKNGSFQPTNEMMLKFYSFYKQATEGPCKLSRPGFWDPIGPYKWD
AWSSLGDMTKEEANIAYVEEMKKTIETMPMTEKVEELLRVIGPFYETVEDKKSGRSSDTTSDLGNVLTSTPNAKTVNGKAES
SDSGAESEEEEAGEEVKGAEQSDNDKKMMKKSADHKNLEVIVTNGYDKDGFVQDIQNKIHASSSLNGRSTEEVKPIDENLGG
TGKSAVCIHQDINDDHVEDVTGIQHLTSDSDSEVYCDSMEQFGGEESLDSFTSNNGPFQYYLGGHSSQPMENSGFREDIQVP
PGNGNIGNMQVVAVEGKGEVKHGGEDGGNNSGAPHREKRCGETDEFSNVRRGRGHRMQHLSEGTKGRQVGSGGDGERWGSDR
GSPAAGSLNEQIALVLMRLQEDMQNVLQRLQKLETLTALQAKSSTSTLQTAPQPTSQRPSWWPFAAMPSR

[0521] NOV26c

[0522] In an alternative embodiment, a NOV26 variant is NOV26c of 1401 nucleotides (also referred to as CG51523-05_{—}164732479), shown in Table 26H. A NOV26c variant differs from NOV26a at positions 71, 170, 313, and 403, and by an insertion of 11 amino acids at positions 161-162.

TABLE 26H
NOV26c nucleotide sequence.

(SEQ ID NO: 251)

AAGCTTACTAGGTTTGAGGCGGCCGTGAAGGTGATCCAGAGTTTGCCGAAGAATGGTTCATTCCAGCCAACAAATGAAAT
GATGCTTAAATTTTATAGCTTCTATAAGCAGGCAACTGAAGGACCCTGTAAACTTTCAAGGCCTGGATTTTGGGATCCTA
TTGGAAGATATAAATGGGATGCTTGGAGTTCACTGGGTGATATGACCAAAGGGGAAGCCATGATTGCATATGTTGAAGAA
ATGAAAAAGATTATTCAAACTATGCCAATGACTGAGAAAGTTGAAGAATTGCTGCGTGTCATAGGTCCATTTTATGAAAT
TGTCGAGGACAAAAAGAGTGGCAGGAGTTCTGATATAACCTCAGTCCGACTGCAGAAAATCTCTAAATGTTTAGAAGATC
TTGGTAATGTTCTCACTTCTACTCCGAACGCCAAAACCGTTAATCGTAAAGCTGAAAGCAGTCACAGTGGAGCCGAGTCT
GAGGAAGAAGAGGCCCAAGAAGAAGTGAAAGGAGCAGAACAAAGTGATAATGATAAGAAAATGATGAAGAAGTCAGCAGA
CCATAAGAATTTGGAAGTCATTGTCACTAATGGCTATCATAAAGATGGCTTTGTTCAGGATATACAGAATGACATTCATG
CCAGTTCTTCCCTGAATGGCAGAAGCACTGAAGAAGTAAAGCCCATTCATGAAAACTTGGGGCAAACTGGAAAATCTGCT
GTTTGCATTCACCAAGATATAAATGATGATCATGTTGAAGATGTTACAGCAATTCAGCATTTGACAAGCGATTCAGACAG
TGAAGTTTACTGTGATTCTATGGAACAATTTGGACAAGAAGAGTCTTTAGACAGCTTTACGTCCAACAATGGACCATTTC
AGTATTACTTGGGTGGTCATTCCAGTCAACCCATGGAAAATTCTGGATTTCGTGAATATATTCAAGTACCTCCTGGAAAT
GGCAACATTGCGAATATGCAGGTGGTTGCAGTTGAAGGAAAAGGTGAAGTCAAGCATGGAGGAGAAGATGGCAGGAATAA
CAGCGGAGCACCACACCGGGAGAAGCGAGGCGGAGAAACTGACGAATTCTCTAATGTTAGAAGAGGAAGAGGACATAGGA
TGCAACACTTGAGCGAAGGAACCAAGGGCCGGCAGGTGGGAAGTACACGTGATGGGGAGCGCTGGGGCTCCGACAGAGGG
TCCCGAGGCAGCCTCAATGAGCAGATCGCCCTCGTGCTGATGAGACTGCAGGAGCACATGCAGAATGTCCTTCAGAGACT
GCAGAAACTGGAAACGCTGACTGCTTTGCAGGCAAAATCATCAACATCAACATTGCAGACTGCTCCTCAGCCCACCTCAC
ACAGACCATCTTGGTGGCCCTTCGAGATGTCTCCTCTCGAG

[0523] TABLE 26I
Encoded NOV26c protein sequence.

(SEQ ID NO: 252)

KLTRFEAAVKVIQSLPKNGSFQPTNEMMLKFYSFYKQATEGPCKLSRPGFWDPIGRYKWDAWSSLGDMTKGEAMIAYVEE
MKKIIETMPMTEKVEELLRVIGPFYEIVEDKKSGRSSDITSVRLEKISKCLEDLGNVLTSTPNAKTVNGKAESSDSGAES
EEEEAGEEVKGAEQSDNDKKMNKKSADHKNLEVIVTNGYDBDGFVQDIQNDIHASSSLNGRSTEEVKPIDENLGGTGKSA
VCIHQDINDDHVEDVTGIQHLTSDSDSEVYCDSMEQFCGEESLDSFTSNNGPFQYYLGGHSSQPMENSGFREYIQVPPCN
NIGNMQVVAVEGKGEVKHGGEDGRNNSCAPHREKRGGETDEFSNVRRGRGHRMQHLSEGTKGRQVGSCGDGERWGSDRGS
RCSLNEQIALVLMRLQEDMQNVLQRLQKLETLTALQAKSSTSTLQTAPQPTSQRPSWNPFEMSPLE

[0524] NOV26d

[0525] In an alternative embodiment, a NOV26 variant is NOV26d of 1401 nucleotides (also referred to as CG51523-05_{—}164732506), shown in Table 26J. A NOV26d variant differs from NOV26a at positions 170, 292, and 403, and by the insertion of 11 amino acids at position 161-162.

TABLE 26J
NOV26d nucleotide sequence.

(SEQ ID NO: 253)

AAGCTTACTAGGTTTGAGGCGGCCGTGAAGGTGATCCAGAGTTTGCCGAAGAATGGTTCATTCCAGCCAACAAATGAAAT
GATGCTTAAATTTTATAGCTTCTATAAGCAGGCAACTGAAGGACCCTGTAAACTTTCAAGGCCTGGATTTTGGGATCCTA
TTGGAAGATATAAATGGGATGCTTGGAGTTCACTGGGTGATATGACCAAAGAGGAAGCCATGATTGCATATGTTGAAGAA
ATGAAAAAGATTATTGAAACTATGCCAATGACTGAGAAAGTTGAAGAATTGCTGCGTGTCATAGGTCCATTTTATGAAAT
TGTCGAGGACAAAAAGAGTGGCAGGAGTTCTGATATAACCTCAGTCCGACTGGAGAAAATCTCTAAATGTTTAGAAGATC
TTGGTAATGTTCTCACTTCTACTCCAAACGCCAAAACCGTTAATGGTAAAGCTGAAAGCAGTGACAGTGGAGCCGAGTCT
GAGGAAGAAGAGGCCCCAAGAAGAAGTGAAAGGAGCAGAACAAAGTGATAATGATAAGAAATGATGAAGAAGTCAGCAGA
CCATAAGAATTTGGAAGTCATTGTCACTAATGGCTATGATAAAGATGGCTTTGTTCAGGATATACAGAATGACATTCATG
GTTTGCATTCACCAAGATATAAATGATGATCATGTTGAAGATGTTACAGGAATTCAGCATTTGACAAGCGATTCAGACAG
TGAAGTTTACTGTGATTCTATGGAACAATTTGGACAAGAAGAGTCTTTAGACAGCTTTACGTCCCAACAATGGACAATTC
AGTATTACTTGGGTGGTCATTCCAGTCAACCCATGGAAAATTCTGGATTTCGTGAAGATATTCAAGTACCTCCTGGAAAT
GGCAACATTGGGAATATGCAGGTGGTTGCAGTTGAAGGAAAAGGTGAAGTCAAGCATGGAGGAGAAGATGGCAGGAATAA
CAGCGGAGCGCCACACCGGGAGAAGCGAGGCGGAGAAACTGATGAATTCTCTAATGTTAGAAGAGGAAGAGGACATAGGA
TGCAACACTTGAGCGAAGGAACCAAGGGCCGGCAGGTGGGAAGTGGAGGTGATGGGGAGCGCTGGGGCTCCGACAGAGGG
TCCCGAGGCAGCCTCAATGAGCAGATCGCCCTCGTGCTGATGAGACTGCAGGAGGACATGCAGAATGTCCTTCAGAGACT
GCAGAAACTGGAAACGCTGACTGCTTTGCAGGCAAAATCATCAACATCAACATTGCAGACTGCTCCTCAGCCCACCTCAC
AGAGACCATCTTGGTGGCCCTTCGAGATGTCTCCTCTCGAG

[0526] TABLE 26K
Encoded NOV26d protein sequence.

(SEQ ID NO: 254)

KLTRFEAAVKVIQSLPKNGSFQPTNEMMLKFYSFYKQATEGPCKLSRPGFWDPIGRYKWDAWSSLGDMTKEEAMIAYVEEM
KKIIETMPMTEKVEELLRVIGPFYEIVEDKKSGRSSDITSVRLEKISKCLEDLGNVLTSTPNAKTVNGKAESSDSGAESEE
EAGEEVKGAEQSDNDKKMMKKSADHKNLEVIVTNGYDKDGFVQDIQNDIHASSSLNGRSTEEVKPIDENLGGTGKSAVCIH
QDINDDHVEDVTGIQHLTSDSDSEVYCDSMEQFGGEESLDSFTSNNGGFQYYLGGHSSQPMENSGFREDIQVPPGNNIGNM
QVVAVEGKGEVKHGGEDGRNNSGAPHREKRGGETDEFSNVRRGRdHRMQHLSEGTKGRQVGSGGDGERWGSDRGSRGSLNE
QIALVLMRLQEDMQNVLQRLQKLETLTALQAKSSTSTLQTAPQPTSQRPSAAPFEMSPLE

[0527] NOV26e

[0528] In an alternative embodiment, a NOV26 variant is NOV26e of 1401 nucleotides (also referred to as CG51523-05_{—}164732693), shown in Table 26L. A NOV26e variant differs from NOV26a at the protein level at positions 170 and 403, and by the insertion of 11 amino acids at position 161-162.

TABLE 26L
NOV26e nucleotide sequence.

(SEQ ID NO: 255)

AAGCTTACTAGGTTTGAGGCGGCCGTGAAGGTGATCCAGAGTTTGCCGAAGAATGGTTCATTCCAGCCAACAAATGAAAT
GATGCTTAAATTTTATAGCTTCTATAAGCAGGCAACTGAAGGACCCTGTAAACTTTCAAGGCCTGGATTTTGGGATCCTA
TTGGAAGATATAAATGGGATGCTTGGAGTTCACTGGGTGATATGACCAAAGAGGAAGCCATGATTGCATATGTTGAAGAA
ATGAAAAAGATTATTGAAACTATGCCAATGACTGAGAAAGTTGAAGAATTGCTGCGTGTCATAGGTCCATTTTATGAAAT
TGTCGAGGACAAAAAGAGTGGCAGGAGTTCTGATATAACCTCAGTCCGACTGGAGAAAATCTCTAAATGTTTAGAAGATC
TTGGTAATGTTCTCACTTCTACTCCAAACGCCAAAACCGTTAATGGTAAAGCTGAAAGCAGTGACAGTGGAGCCGAGTCT
GAGGAAGAAGAGGCCCAAGAAGAAGTGAAAGGAGCAGAACAAAGTGATAATGATAAGAAAATGATGAAGAAGTCACCAGA
CCATAAGAATTTGGAAGTCATTGTCACTAATGGCTATGATAAAGATGGCTTTGTTCAGGATATACAGAATGACATTCATG
CCAGTTCTTCCCTGAATGGCAGAAGCACTGAAGAAGTAAAGCCTATTGATGAAAACTTGGGGCAAACTGGAAAATCTGCT
GTTTGCATTCACCAAGATATAAATGATGATCATGTTGAAGATGTTACAGGAATTCAGCATTTGACAAGCGATTCAGACAG
TGAAGTTTACTGTGATTCTATGGAACAATTTGGACAAGAAGAGTCTTTAGACAGCTTTACGTCCAACAATGGACAATTTC
AGTATTACTTGGGTGGTCATTCCAGTCAACCCATGGAAAATTCTGGATTTCGTGAAGATATTCAAGTACCTCCTGGAAAT
GGCAACATTGGGAATATGCAGGTGGTTGCAGTTGAAGGAAAGGTGAAGTCAAGCATGGAGGAGAAGATGGCAGGGAATAA
CAGCGGAGCGCCACACCGGGAGAAGCCAGGCGGAGAAACTGATGAATTCTCTAATGTTAGAAGAGGAAGAGGACATAGGA
TGCAACACTTGAGCGAAGGAACCAAGGGCCGGCAGGTGGGAAGTGGAGGTGATGGGGAGCGCTGGGGCTCCGACAGAGGG
TCCCGAGGCAGCCTCAATGAGCAGATCGCCCTCGTGCTGATGAGACTGCAGGAGGACATGCAGAATGTCCTTCAGAGACT
GCAGAAACTGGAAACGCTGACTGCTTTGCAGGCAAAATCATCAACATCAACATTGCAGACTGCTCCTCAGCCCACCTCAC
AGAGACCATCTTGGTGGCCCTTCCGAGATGTCTCCTCTCGAG

[0529] TABLE 26M
NOV26e amino acid sequence.

(SEQ ID NO: 256)

KLTRFEAAVEQKVIQSLPKNGSFQPTNEMMLKFYKQATEGPCKLSRPGFWDPIGRYKWDAWSSLGDMTKEEGAMIAYVEEM
KKIIETMPMTEKVEELLRVIGPFYEIVEDKKSGRSSDITSVRLEKISKCLEDLEEEEAQEEVKGAEQSDNDKKMMKKSADH
KNLEVIVTNGYDKDGFVQDIQNDIHASSSLNGRSTEEVKPIDENLGQTGKSAVCIHQDINDDHVEDVTGIQHLTSDSDSEV
YCDSMEQFGQEESLDSTSNNGPFQYYLGGHSSQPMENSGFREDIQVPPGNNIGNMQVVAVEGKEGEVKHGGEDGRNNSGAP
HREKRGGETDEFSNVRRGRGHRMQHLSEGTKGRQVGSGGDGERWGSDRGSRGSLNEQIALVLMRLQEDMQNVLQRLQKLET
LTALQAKSSTSTLQTAPQPTSQRPSWWPFEMSPLE

[0530] NOV26f

[0531] In an alternative embodiment, a NOV26 variant is NOV26f of 1368 nucleotides (also referred to as CG51523-05_{—}164732709), shown in Table 26N. A NOV26f variant differs from NOV26a at the protein level at positions 170, 403, 449, and 485.

TABLE 26N
NOV26f nucleotide sequence.

(SEQ ID NO: 257)

AAGCTTACTAGGTTTGAGGCGGCCGTGAAGGTGATCCAGAGTTTGCCGAAGAATGGTTCATTCCAGCCAACAAATGAAAT
GATGCTTAAATTTTATAGCTTCTATAAGCAGGCAACTGAAGGACCCTGTAAACTTTCAAGGCCTGGATTTTGGGATCCTA
TTGGAAGATATAAATGGGATGCTTGGAGTTCACTGGGTGATATGACCAAAGAGGAAGCCATGATTGCATATGTTGAAGAA
ATGAAAAAGATTATTGAAACTATGCCAATGACTGAGAAAGTTGAAGAATTGCTGCGTGTCATAGGTCCATTTTATGAAAT
TGTCGAGGACAAAAAGAGTGGCAGGAGTTCTGATATAACCTCAGATCTTGGTAATGTTCTCACTTCTACTCCGAACGCCA
AAACCGTTAATGGTAAAGCTGAAAGCAGTGACAGTGGAGCCGAGTCTGAGGAAGAAGAGGCCCAAGAAGAAGTGAAAGGA
GCAGAACAAAGTGATAATGATAAGAAAATGATGAAGAAGTCAGCAGACCATAAGAATTTGGAAGTCATTGTCACTAATGG
CTATGATAAAGATGGCTTTGTTCAGGATATACAGAATGACATTCATGCCAGTTCTTCCCTGAATGGCAGAAGCACTGAAG
AAGTAAAGCCCATTGATGAAAACTTGGGGCAAACTGGAAAATCTGCTGTTTGCATTCACCAAGATATAAATGATGATCAT
GTTGAAGATGTTACAGGAATTCAGCATTTGACGAGCGATTCAGACAGTGAAGTTTACTGTGATTCTATGGAACAATTTGG
ACAAGAAGAGTCTTTAGACAGCTTTACGTCCAACAATGGACCATTTCAGTATTACTTGGGTGGTCATTCCAGTCAACCCA
TGGAAAATTCTGGATTTCGTGAAGATATTCAAGTACCTCCTGGAAATGGCAACATTGGGAATATGCAGGTGGTTGCAGTT
GAAGGAAAAGGCGAAGTCAAGCATGGAGGAGAAGATGGCAGGAATAACAGCGGAGCACCACACCGGGAGAAGCGAGGCGG
AGAAACTGACGAATTCTCTAATGTTAGAAGAGGAAGAGGACATAGGATGCAACACTTGAGCGAAGGAACCAAGGGCCGGC
AGGTGGGAAGTGGAGGTGATGGGGAGCGCTGGGGCTCCGACAGAGGGTCCCGAGGCAGCCTCAATGAGCAGATCGCCCTC
GTGCTGATGAGACTGCAGGAGGACATACAGAATGTCCTTCAGAGACTGCAGAAACTGGAAACGCTGACTGCTTTGCGGGC
AAAATCATCAACATCAACATTGCAGACTGCTCCTCAGCCCACCTCACAGAGATCATCTTGGTGGCCCTTCGAGATGTCTC
CTCTCGAG

[0532] TABLE 26O
Encoded NOV26f protein sequence.

(SEQ ID NO: 258)

KLTRFEAAVKVIQSLPKNGSFQPTNEMMLKFYSFYKQATEGPCKLSRPGFWDPIGRYKWDAWSSLGDMTKEEMIAYVEEM
KKIIETMPMTEKVEELLRVIGPFYEIVEDKKSGRSSDITSDLGNVLTSTPNAKTVNGKAESSDSGAESEEEAQEEVKGEQ
SDNDKKMMKKSADHKNLEVIVTNGYDKDGFVQDIQNDIHASSSLNGRSTEEVKPIDENLGQTGKSAVCIHQDINDDEDVT
GIQHLTSDSDSEVYCDSMEGFGQEESLDSFTSNNGPFQYYLGGHSSQPMENSGFREDIQVPPGNGNIGNMQVAVGKGEVK
HGGEDGRNNSGPHREKRGGETDEFSNVRRQRGHRMQHLSEGTKGRQVGSGGDGERWQSDRGSRGSLNEQIALVLMRLQED
IQNVLQRLQKLETLTALQAKSSTSTLQTAPQPTSQRSSWWPFEMSPLE

[0533] NOV26g

[0534] In an alternative embodiment, a NOV26 variant is NOV26g of 1586 nucleotides (also referred to as CG51523-05_{—}164718189), shown in Table 26P. A NOV26g variant differs from NOV26a by 2 amino acids at positions 170 and 403.

TABLE 26P
NOV26g nucleotide sequence.

(SEQ ID NO: 259)

AAGCTTCCACCATGTTCCAGTTTCATGCAGGCTCTTGGGAAAGCTGGTGCTGCTGCTGCCTGATTCCCGCCGACAGACCT
TGGGACCGGGGCCAACACTGGCAGCTGGAGATGGCGGACACGAGATCCGTGCACGAGACTAGGTTTGAGGCGGCCGTGAA
GGTGATCCAGAGTTTGCCGAAGAATGGTTCATTCCAGCCAACAAATGAAATGATGCTTAAATTTTATAGCTTCTATAAGC
AGGCAACTGAAGGACCCTGTAAACTTTCAAGGCCTGGATTTTGGGATCCTATTGGAAGATATAGATAAGATGCTTGGAGT
TCACTGGGTGATATGACCAAAGAGGAAGCCATGATTGCATATGTTCAAGAAATGAAAAAGATTATTGAAACTATGCGAAT
GACTGAGAAAGTTGAAGAATTGCTGCGTGTCATAGGTCCATTTTATGAAATTGTCGAGGACAAAAAGAGTGGAAGGAGTT
CTGATATAACCTCAGATCTTGGTAATGTTCTCACTTCTACTCCGAACGCCAAAACCGTTAATGGTAAAGCTGAAAGCAGT
GACAGTGGAGCCGAGTCTGAGGAAGAAGAGGCCCAAGAAGAAGTGAAAGGAGCAGAACAAAGTGATAATGATAAGAAAAT
GATGAAGAGTCAGCAGACCATAAGAATTTGGAAGTCATTGTCACTAATGGCTATGATAAAGATGGCTTTGTTCAGATTTA
TACAGAATGACATTCATGCCAGTTCTTCCCTGAATGGCAGAAGCACTGAAGAAGTAAAGCCCATTGATGAAAACTTGGGG
CAAACTGGAAAATCTGCTGTTTGCATTCACCAAGATATAAATGATGATCATGTTGAAGATGTTACAGGAATTCAGCATTT
GACAAGCGATTCAGACAGTGAAGTTTACTGTGATTCTATGGAACAATTTGQACAAGAAGAGTCTTTAGAGGGCTTTACGT
CCAACAATGGACCATTTCAGTATTACTTGGGTGGTCATTCCAGTCAACCCATGGAAAATTCTGGATTTCGTGAAGATATT
CAAGTACCTCCTGGAAATGGCAACATTGGGAATATGCAGGTGGTTGCAGTTGAAGGAAAAGGTGAAGTCAAGCATGGAGG
AGAAGATGGCAGGAATAACAGCGGAGCACCACACCGGGAGAAGCGAGGCGGAGAAACTGACGAATTCTCTAATGTTAGAA
GAGGAAGAGGACATAGGATGCAACACTTGAGCGAAGGAACCAAGGGCCGGCAGGTGGGAAGTGGAGGTGATGGGGAGCGC
TGQGGCTCCGACAGAGGTCCCGAGGCAQCCTcATCAGCAGATCGCCCTCGTGCTGATGAGACTGCTGCAGAGGACATGCA
GAATGTCCTTCAGAGACTGCAGAAACTGGAAACGCTGACTGCTTTGCAGGCAAAATCATCAACATCAACATTGCAGACTG
CTCCTCAGCCCACCTCACAGAGACCATCTTGGTGGCCCTTCGAGATGTCTCCTGGTGTGCTAACGTTTGCCATCATATGG
CCTTTTATTGCACAGTGGTTGGTGTATTTATACTATCAAAGAAGGAGAAGAAAACTGAACCTCGAG

[0535] TABLE 26Q
Encoded NOV26g protein sequence.

(SEQ ID NO: 260)

ASTMFQFHAGSWESWCCCCLIPADRPWDRGQHWQLEMADTRSVHETRFEAAVKVIQSLPKNGSFQPTNEMMLKFYSFYKQ
ATEGPCKLSRPGFWDPIGRYKWDAWSSLGDMTKEEAMIAYVEEMKKIIETMPMTEKVEELLRVIGPFYEIVEDKKSGRSS
DITSDLGNLTSTPNAKTVNGKAESSDSCAESEEEEAQEEVKQAEQSDNDKKMMKKSADHKNLEVIVTNGYDKGDGFVQDI
QNDIHASSSLNGRSTEEVKPIDENLGQTGKSAVCIHQDINDDHVEDVTGIQHLTSDSDSEVYCDSMEQFGQEESLDSFTS
NNGPFQYYLGGHSSQPMENSGFREDIQVPPGNGNIGNMQVVAVEGKGEVKHGGEDGRNNSGAPHREKRGGETDEFSNVRR
QRGHRMQHLSEGTKGRQVGSGGDGERWGSDRGSRGSLNEQIALVLMRLQEDMQNVLQRLQKLETLTALQAKSSTSTLQTA
PQPTSQRPSWWPFEMSPGVLTFAIIWPFIAQWLVYLYYQRRRRKLNLE

[0536] NOV26h

[0537] In an alternative embodiment, a NOV26 variant is NOV26h of 1618 nucleotides (also referred to as CG51523-05_{—}164718193), shown in Table 26R. A NOV26h variant differs from NOV26a by the first twenty amino acids, and the 3 amino acids at positions 170, 182 and 403. In addition, NOV26h differs from NOV26a by the insertion of eleven amino acids at position 161-162.

TABLE 26R
NOV26h nucleotide sequence.

(SEQ ID NO: 261)

AAGCTTCCACCATGTTCCAGTTTCATGCAGGCTCTTGGGAAGCTGGTGCTGCTGCTGCCTGATTCCGCCGACAGACCTTG
GACCGGGQCCAACACTGGCAGCTGGAGATGGCGGACACGAGATCCGTGCACGAGACTAGGTTTGAGGCGGCCGTGAAGGT
CATCCAGAGTTTGCCGAAGAATGGTTCATTCCAGCCAACAAATGAAATGATGCTTAAATTTTATAGCTTCTATGGCAGQC
AACTGAAGGACCCTGTAAACTTTCAAGGCCTGGATTTTGGGATCCTATTGGAAGATATAAATGGGATGCTTGAGTTCACT
GGGTGATATGACCAAAGAGGAAGCCATGATTGCATATGTTGAACAAATGAAGATTATTGAAACTATAGGCCAATGACTGA
GAAAGTTGAAGAATTGCTGCGTGTCATAGGTCCATTTTATGAATTGTCGAGGACAAATCGAGTGGAAGGAGTTCTGATAT
AACCTCAGTCCGACTGGAGAAAATCTCTAAATGTTTAGAAGATCTTGGTAATGTTCTGACTTCTACTCTTACGCCAAAAC
CGTTAATGGTAAAGCTGAAGGCAGTGACAGTGGAGCCGAGTCTGAGGAAGAAGAGGCCAAGAAGAAGTGAAACGAGCAGA
ACAAAGTGATAATGATAAGAAAATGATGAAGAAGTCAGCAGACCATAAGAATTTGGAAGTCATTGTCACTAATGGCTATG
ATAAAGATGGCTTTGTTCAGGATATACAGAATGACATTCATGCCAGTTCTTCCCTGAATGGCAGAAGCACTGAAGAAGTA
AAGCCCATTCATCAAAACTTGGGGCAAACTGGAAAATCTGCTGTTTGCATTCACCAAGATATAAATGATGATCATGTTGA
GATGTTACGAATTCAGCATTTGACAAGCGATTCAGACAGTGAAGTTTACTGTGATTCTATGGAACAATTTTTTGGACAAG
AAGAGTCTTTAGACAGCTTTACGTCCAACAATGGACCATTTCAGTATTACTTGGOTGGTCATTCCAGTCAACCCATGGAA
AATTCTGGATTTCGTGAAGATATTCAAGTACCTCCTGGAAATCGCAACATTGGGAATATGCAGGTGGTTGCAGTTCAAGG
AAAAGGTGAAGTCAAGCATGGACGAGAAQATGGCAGGAATAACACCGGAGCACCACACCAGGACAAGCCAGCCGGAGAAA
CTGACGAATTCTCTAATGTTAGAAGAGGAAGAGGACATACGATGCAACACTTGAGCGAAGGAACCAAGGGCCGGCAGGTG
GGAAGTGGAGGTGATCGCGAGCGCTGCGGCTCCGACAGAGGGTCCCGAGGCAGCCTCAATGAGCAGATCGCCCTCGTGCT
GATGACACTGCAGGAGGACATGCAGAATGTCCTTCAGAGACTGCAGAAACTGGAAACGCTGACTGCTTTCCAGGCAAAAT
CATCAACATCAACATTGCAGACTGCTCCTCAGCCCACCTCACAGAGACCATCTTGGTGGCCCTTCGAGATGTCTCCTGGT
GTGCTAACGTTTGCCATCATATCGCCTTTTATTGCACAGTGGTTGGTGTATTTATACTATCAAAGAAGGAGAAGAAAACT
GAACCTCGAG

[0538] TABLE 26S
Encoded NOV26h protein sequence.

(SEQ ID NO: 262)

SFHHVPVSCRLLGKLVLLLPDSADRPWDRCWQLEMADTRSVHETRFEAAVICVIQSLPKNGSFQPTNEMMLKFYSFYKQA
TEGPCKLSRPOFWDPIGRYKWDAWSSLGDMTKEEANIAYVEEMKKIITMPMTEKVEELLRVIGPFYEIVEDKKSGRSSDI
TSVRLEKISKCLEDLGNVLTSTPNAKTNGKAEGSDSGAESEEEEAQEEVKGAEQSDNDRKMMKKSADHRNLEVIVTNGYD
DGFVQDIQNDIHASSSLNCRSTEEVKPIDENLGQTGKSAVCIHQDINUDHVEDVTGIQHLTSDSDSEVYCDSMEQFCQEE
SLDSFTSNNIGPFQYYLGGHSSQPMENSGFREDIQVPPGNGNIGNMQVVAVEGKGEVKHGGEDGRNNSGAPHREKGETDE
FSNRRGRGHRMQNLSEGTKGRQVGSGGDGERWGSDRGSRGSLNEQTALVLMRLQEDMQNVLQRLQKLETLTALQAKSSTS
TLQTAPQPTSQRPSWWPFEMSPGVLTFAIIWPFIAQWLVYLYYQRRRRKLNLE

[0539] NOV26i

[0540] In an alternative embodiment, a NOV26 variant is NOV26i of 1586 nucleotides (also referred to as CG51523-05_{—}164718197), shown in Table 26T. A NOV26i variant differs from NOV26a by 4 amino acids at positions 170, 403, 422 and 466.

TABLE 26T
NOV26i nucleotide sequence.

(SEQ ID NO: 263)

AAGCTTCCACCATGTTCCAGTTTCATGCAGGCTCTTGGGAAAGCTGGTGCTGCTGCTGCCTGATTCCCGCCGACAGACCT
TGGGACCGGGGCCAACACTGGCAGCTGGAGATGGCGGACACGAGATCCGTGCACGAGACTAGGTTTGAGGCGGCCGTGAA
GGTGATCCAGAGTTTGCCGAAGAATGGTTCATTCCAGCCAACAAATGAAATGATGCTTAAATTTTATAGCTTCTATAAGC
AGGCAACTGAAGGACCCTGTAAACTTTCAAGGCCTGGATTTTGGGATCCTATTGGAAGATATAAATGGGATGCTTGGAGT
TCACTGGGTGATATGACCAAAGAGGAAGCCATGATTGCATATGTTGAAGAAATGAAAAAGATTATTGAAACTATGCCAAT
GACTGAGAAAGTTGAAGAATTGCTGCGTGTCATAGGTCCATTTTATGAAATTGTCGAGGACAAAAAGAGTGGCAGGAGTT
CTGATATAACCTCAGATCTTGGTAATGTTCTCACTTCTACTCCGAACGCCAAAACCGTTAATGGTAAAGCTGAAAGCAGT
GACAGTGGAGCCGAGTCTGAGGAAGAAGAGGCCCAAGAAGAAGTGAAAGGAGCAGAACAAAGTGATAATGATAAGAAAAT
GATGAAGAAGTCAGCAGACCATAAGAATTTGGAAGTCATTGTCACTAATCGCTATCATAAAGATAGCTTTGTTCAGGATA
TACAGAATGACATTCATGCCAGTTCTTCCCTGAATGGCAGAAGCACTGAAGAAGTAAAGCCCATTGATCAAAACTTGGGG
CAAACTGGAAAATCTGCTGTTTGCATTCACCAAGATATAAATGATGATCATGTTGAAGATGTTACAGGAATTCAGCATTT
GACAAGCGATTCAGACAGTGAAGTTTACTGTGATTCTATGGAACAATTTGGACAAGAAGAGTCTTTAGACAGCTTTACGT
CCAACAATGGACCATTTCAGTATTACTTGGGTGGTCATTCCAGTCAACCCATGGAAAATTCTGGATTTCGTGAAGATATT
CAAGTACCTCCTCGAAATGGCAACATTGGGAATATGCAGGTGGTTGCAGTTGAAGGAAAAGGTGAAGTCAAGCATGGAGC
AGAAGATGGCAGGAATAACAGCCGACCACCACACCGGGAGAAGCGAGGCGGAGAAACTGACGAATTCTCTAATGTTACAA
GAGGAACAGGACATAGGATGCAACACTTGAGCCAAGGAACCAAGGGCCGGCAGGTGGGAAGTGGAGGTGATGGGCGGCGC
TGGGGCTCCGACAGAGGGTCCCGAGGCAGCCTCAATGAGCAGATCGCCCTCGTGCTCATGAGACTGCAGGAGGACATGCA
GAATGTCCTTCAGAGACTGCAGAAACTGGAAACGCTGACTGCTTTGCGGGCAAAATCATCAACATCAACATTGCAGACTG
CTCCTCAGCCCACCTCACAGAGACCATCTTGGTGGCCCTTCGAGATGTCTCCTGGTGTGCTAACGTTTGCCATCATATGG
CCTTTTATTGCACAGTGGTTGGTGTATTTATACTATCAAAGAAGGAGAAGAAAACTGAACCTCGAG

[0541] TABLE 26U
Encoded NOV26i protein sequence.

(SEQ ID NO: 264)

ASTMFQFHAGSWESWCCCCLIPADRPWDRGQHWQLEMADTRSVHETRFEAAVKVIQSLPKNGSFQPTNEMMLKFYSFYKQA
TEGPCKLSRPGFWDPIGRYKWDAWSSLGDMTKEEAMIAYVEEMKKIIETMPMTEFVEELLRVIGPFYEIVEDKKSGRSSDI
TSDLGNVLTSTPNAKTVNGKAESSDSGAESEEEEAQEEVKGAEQSDNDKKMMKKSADHKNLEVIVTNGYDKDGFVQDIQND
IHASSSLNGRSTEEVKPIDENLGQTGKSAVCIHQDINDDHVEDVTGIQHLTSDSDSEVYCDSMEQFGQEESLDSFTSNNGP
FQYYLGGHSSQPMENSGFREDIQVPPGNGNIGNMQVVAVEGKGEVKHGGEDGRNNSGAPHREKRGGETDEFSNVRRGRGHR
MQHLSEGTKGRQVGSGGDGGRWGSDRGSRGSLNEQIALVLMRLQEDMQNVLQRLQKLETLTALRAKSSTSTLQTAPQPTSQ
RPSWWPFEMSPGVLTFAITWPFIAQWLVYLYYQRRRRKLNLE

[0542] NOV26j

[0543] In an alternative embodiment, a NOV26 variant is NOV26j of 1517 nucleotides (also referred to as CG51523-05_{—}164718205), shown in Table 26V. A NOV26j variant differs from NOV26a by 4 amino acids at positions 35, 121, 170 and 403, and by a deletion of twenty-three amino acids at position 350.

TABLE 26V
NOV26j nucleotide sequence.

(SEQ ID NO: 265)

AAGCTTCCACCATGTTCCAGTTTCATGCAGGCTCTTGGGAAAGCTGGTGCTGCTGCTGCCTGATTCCCGCCGACAGACCT
TGGGACCGGGGCCAACACTGGCAGCTGGAGATGGTGGACACGAGATCCGTGCACGAGACTAGGTTTGAGGCGGCCGTGAA
GGTGATCCAGAGTTTGCCGAAGAATGGTTCATTCCAGCCAACAAATGAAATGATGCTTAAATTTTATAGCTTCTATAAGC
AGGCAACTGAAGGACCCTGTAAACTTTCAAGGCCTGGATTTTGGGATCCTATTGGAAGATATAAATGGGATGCTTGGAGT
TCACTGGGTGATATGACCAAAGAGGAAGCCATGATTGCATATGTTGAAGAAGTGAAAAAGATTATTGAAACTATGCCAAT
GACTGAGAAAGTTGAAGAATTGCTGCGTGTCATAGGTCCATTTTATGAAATTGTCGAGGACAAAAAGAGTGGCAGGAGTT
CTGATATAACCTCAGATCTTGGTAATGTTCTCACTTCTACGCCAAACGCCAAAACCGTTAATGGTAAAGCTGAAAGCAGT
GACAGTGGAGCCGAGTCTGAGGAAGAAGAGGCCCAAGAAGAAGTGAAAGGAGCAGAACAAAGTGATAATGATAAGAAAAT
GATGAAGAAGTCAGCAGACCATAAGAATTTGGAAGTCATTGTCACTAATGGCTATGATAAAGATGGCTTTGTTCAGGATA
TACAGAATGACATTCATGCCAGTTCTTCCCTGAATGGCAGAAGCACTGAAGAAGTAAAGCCCATTGATGAAAACTTGGGG
CAAACTGGAAAATCTGCTGTTTGCATTCACCAAGATATAAATGATGATCATGTTGAAGATGTTACAGGAATTCAGCATTT
GACAAGCGATTCAGACAGTGAAGTTTACTGTGATTCTATGGAACAATTTGGACAAGAAGAGTCTTTAGACAGCTTTACGT
CCAACAATGGACCATTTCAGTATTACTTGGGTGGTCATTCCAGTCAACCCATGGAAAATTCTGGATTTCGTGAAGATATT
CAAGTACCTCCTGGAAATGGCAGGAATAACAGCGGAGCACCACACCGGGAGAAGCGAGGCGGAGAAACTGACGAATTCTC
TAATGTTAGAAGAGGAAGAGGACATAGGATGCAACACTTGAGCGAAGGAACCAAGGGCCGGCAGGTGGGAAGTGGAGGTG
ATGGGGAGCGCTGGGGCTCCGACAGAGGGTCCCGAGGCAGCCTCAATGAGCAGATCGCCCTCGTGCTGATGAGACTGCAG
GAGGACATGCAGAATGTCCTTCAGAGACTGCAGAAACTGGAAACGCTGACTGCTTTGCAGGCAAAATCATCAACATCAAC
ATTGCAGACTGCTCCTCAGCCCACCTCACAGAGACCATCTTGGTGGCCCTTCGAGATGTCTCCTGGTGTGCTAACGTTTG
CCATCATATGGCCTTTTATTGCACAGTGGTTGGTGTATTTATACTATCAAAGAAGGAGAAGAAAACTGAACCTCGAG

[0544] TABLE 26W
Encoded NOV26j protein sequence.

(SEQ ID NO: 266)

ASTMFQFHAGSWESWCCCCLIPADRPWDRGQHWQLEMVDTRSVHETRFEAAVKVIQSLPKNGSFQPTNEMMLKFYSFYKG
ATEGPCKLSRPGFWDPIGRYKWDAWSSLGDMTKEEAMIAYVEEVKKIIETMPMTEKVEELLRVIGPFYEIVEDKKSGRSS
DITSDLGNVLTSTPNAKTVNGKAESSDSGAESEEEEAQEEVKGAEQSDNDKKMMKKSADHKNLEVIVTNGYDKDGFVQDI
QNDIHASSSLNGRSTEEVKPIDENLGQTGKSAVCIHQDINDDHVEDVTGIQHLTSDSDSEVYCDSMEQFGQEESLDSFTS
NNGPFQYYLGGHSSQPMENSGFREDIQVPPGNGRNNSGAPHREKRGGETDEFSNVRRGRGHRMQHLSEGTKGRQVGSGGD
QERWGSDRGSRGSLNEQIALVLMRLQEDMQNVLQRLQKLETLTALQAKSSTSTLQTAPQPTSQRPSWWPFEMSPGVLTFA
IIWPFIAQWLVYLYYQRRRRKLNLE

[0545] NOV26k

[0546] In an alternative embodiment, a NOV26 variant is NOV26k of 1361 nucleotides (also referred to as CG51523-05_{—}164718209), shown in Table 26X. A NOV26k variant differs from NOV26a by 68 amino acid deletion at position 208 and 2 amino acid changes. In addition, at position 162, an 11 amino acid sequence replaces an 18 amino acid sequence.

TABLE 26X
NOV26k nucleotide sequence.

(SEQ ID NO: 267)

AAGCTTCCACCATGTTCCAGTTTCATGCAGGCTCTTGGGAAAGCTGGTGCTGCTGCTGCCTGATTCCCGCCGACAGACCT
TGGGACCGGGGCCAACACTGCCACCTGGAGATGGCGGACACGAGATCCGTCCACCAGACTACGTTTGAGGCGGCCGTGAA
GGTGATCCAGAGTTTGCCGAAGAATGGTTCATTCCAGCCAACAAATGAAATGATGCTTAAATTTTATAGCTTCTATAAGC
AQGCAACTGAAGGACCCTGTAAACTTTCAAGGCCTOGATTTTCGGATCCTATTGGAAGATATAAATGGGATGCTTGGAGT
TCACTGGGTGATATGACCAAAGAGGAAGCCATGATTGCATATGTTGAAGAAATGAAAAAGATTATTGAAACTATGCCAAT
GACTGAGAAAGTTGAAGAATTGCTGCGTGTCATAGGTCCATTTTATGAAATTGTCGAGGACAAAAAGAGTGGCACGAGTT
CTGATATAACCTCAGTCCGACTGGAGAAAATCTCTAAATGTTTAGAAGCTGAAAGCAGTGACAGTGGAGCCGAGTCTGAG
GAAGAAGAGGCCCAAGAAGAAGTGAAAGGAGCAGAACAAAGTGATAATGATATAAATGATGATCATGTTGAAGATGTTAC
AGGAATTCAGCATTTGACAAGCGATTCAGACAGTGAAGTTTACTGTGATTCTATGGAACAATTTGGACAAGAAGAGTCTT
TAGACAGCTTTACGTCCAACAATGGACCATTTCAGTATTACTTGCGTGGTCATTCCAGTCAACCCATGGAAAATTCTGGA
TTTCGTGAAGATATTCAAGTACCTCCTGGAAATGGCAACATTGGGAATATGCAGGTGGTTGCAGTTGAAGGAAAAGGTGA
AGTCAAGCATGGAGGAGAAGATGGCAGGAATAACACCCGAGCGCCACACCCGGACAAGCGAGGCGGAGAAACTGATGAAT
TCTCTAATGTTAGAAGAGGAAGACGACATAGGATGCAACACTTGAGCGAAGCAACCAAGGGCCGGCAGGTGGGAAGTGGA
CGTGATGGGGAGCGCTGGCGCTCCGACAGAGGGTCCCGAGGCAGCCTCAATGAGCAGATCGCCCTCGTGCTGATGAGACT
GCAGGAGGACATGCAGAATGTCCTTCAGAGACTGCAGAAACTCGAAACGCTGACTGCTTTGCAGCCAAAATCATCAACAT
CAACATTGCAGACTGCTCCTCAGCCCACCTCACAGAGACCATCTTGGTGGCCCTTCGAGATGTCTCCTGGTGTGCTAACG
TTTGCCATCATATGCCCTTTTATTGCACAGTGGTTGGCGTATTTATACTATCAAAGAAGGAGAAGAAAACTGAACCTCGA
G

[0547] TABLE 26Y
Encoded NOV26k protein sequence.

(SEQ ID NO: 268)

ASTMFQPHACSWESWCCCCLIPADRPWDRGQHWQLEMADTRSVHETRFEAAVKVIQSLPKNCSFQPTNEMMLKFYSFYKQ
ATEGPCKLSRPGFWDPIGRYKWDAWSSLGDMTKEEAMIAYVEEMKKIIETMPMTEKVEELLRVICPFYEIVEDKKSGRSS
DITSVRLEKISKCLEAESSDSGAESEEEEAQEEVKGAEQSDNDINDDHVEDVTGIQHLTSDSDSEVYCDSMEQFGQEESL
DSFTSNNGPFQYYLGGHSSQPMENSGFREDIQVPPGNGNIGNMQVVAVEGKCEVKHGGEDGRNNSGAPHREKRGGETDEF
SNVRRGRGHRMQHLSEGTKGRQVGSGGDGERWGSDRCSRGSLNEQIALVLMRLQEDMQNVLQRLQKLETLTALQAKSSTS
TLQTAPQPTSQRPSWWPFEMSPGVLTFAIIWPFIAQWLAYLYYQRRRRKLNLEG

[0548] NOV26l

[0549] In an alternative embodiment, a NOV26 variant is NOV26l of 1619 nucleotides (also referred to as CG51523-05_{—}164718213), shown in Table 26Z. A NOV26l variant differs from NOV26a by 5 amino acid changes, and an 11 amino acid insertion at position 161-162.

TABLE 26Z
N0V26l nucleotide sequence.

(SEQ ID NO: 269)

AAGCTTCCACCATGTTCCAGTTTCATGCAGGCTCTTGGOAAAQCTGGTCCTCCTGCTGCCTGATTCCCCCCGACAGGCCT
TGGGACCGGGGCCAACACTGGCAGCTGGAGATGGCGGACACGAGATCCGTGCACGAGACTAGGTTTGAGGCGGCCGTGAA
GGTGATCCAGAGTTTGCCGAAGAATGGTTCATTCCAGCCAACAAATGAAATGATGCTTAAATTTTATACCTTCTATAAGC
AGGCAACTGAAGGACCCTGTAAACTTTCAAGGCCTGGATTTTGGGATCCTATTGGAAGATATAAATGGGATGCTTGGAGT
TCACTGGGTGATATGACCAAACAGGAAGCCATAATTGCATATGTTGAAGAAATGAAAAAGATTATTGAAACTATGCCAAT
GACTQAGAAAGTTGAAGAATTGCTGCGTGTCATAGGTCCATTTTATGAAATTGTCGAGGACAAAAAGAGTGGCAGGAGTT
CTGATATAACCTCAGTCCCACTGGAGAAAATCTCTAAATGTTTACAAGATCTTCGTAATCTTCTCACTTCTACTCCGAAC
GCCAAAACCGTTAATGGTAAAGCTGAAAGCAGTGACAGTGGAGCCGAGTCTGAGGAAGAAGAGGCCCAAGAAGAAGTGAA
AGGAGCAGAACAAAGTGATAATGATAAGAAAATGATCAAGAAGTCAGCAGACCATAAGAATTTGGAAGTCATTCTCACTA
ATGGCTATGATAAAGATGGCTTTGTTCAGGATATACAGAATGACATTCATGCCAGTTCTTCCCTGAATGGCAGAAGCACT
GAACAAGTAAAGCCCATTGATGAAAACTTGaGGCAAACTGGAAAATCTGCTGTTTGCATTCACCAAGATATAAATCATGA
TCATCTTGAAGATGTTACAGGAATTCAOCATTTGACAAGCGATTCAGACAGTGAAGTTTACTGTGATTCTATGGAACAAT
TTGGACAAGAAGAGTCTTTAGACAGCTTTACGTCCAACAATGGACCATTTCAGTATTACTTGGGTGGTCATTCCAGTCAA
CCCATGGAAAATTCTGGATTTCGTGAAGATATTCAAGTACCTCCTGGAAATGGCAACATTGGGAATATGCAGGTTGTTGC
AGTTGAAGGAAAAGGCGAAGTCAAGCATGGAGGAGAAGATGGCACGAATAACAGCGGAGCACCACACCGGGAGGAGCGAG
GCGGAGAAACTGACGAATTCTCTAATGTTAGAAGAGGAAGAGGACATAGGATGCAACACTTGAGCGAAGGAACCAAGGGC
CGGCAGGTGGGAAGTGGAGGTGATGGGGAGCGCTGGGGCTCCGACAGAGGGTCCCGAGGCAGCCTCAATGAGCATATCGC
CCTCGTGCTGATGAGACTGCAGGAGGACATGCAGAATGTCCTTCAGAGACTGCAGAAACTGGAAACGCTGACTGCTTTGC
AGGCAAAATCATCAACATCAACATTGCAGACTGCTCCTCAGCCCACCTCACAGAGACCATCTTGGTGGCCCTTCGAGATG
TCTCCTGGTGTGCTAACGTTTGCCATCATATGGCCTTTTATTGCACAGTGGTTGGTGTATTTATACTATCAAAGAAGGAG
AAGAAAACTGAACCTCGAG

[0550] TABLE 26AA
Encoded NOV26l protein sequence.

(SEQ ID NO: 270)

ASTMFQFHAGSWESWCCCCLIPADRPWDRGQHWQLEMADTRSVHETRFEAAVKVIQSLPKNGSFQPTNEMMLKFYSFYKQA
TEGPCKLSRPGFWDPIGRYKWDAWSSLGDMTKEEAIIAYVEEMKKIIETMPMTEKVEELLRVIGPFYEIVEDKKSGRSSD
ITSVRLEKISKCLEDLGNVLTSTPNKTVNGKAESSDSGAESEEEEAQEEVKGAEQSDNDKKMMKKSADHKNLEVIVTNGY
DKDGFVQDIQNKIHASSSLNGRSTEEVKPIDENLGQTGKSAVCIHQDINDDHVEDVTGIQHLTSDSDSEVYCDSMEQFGQ
EESLDSFTSNNGPFQYYLGGHSSQMENSGFREDIQVPPGNGNIGNMQVVAVEGKGEVKHGGEDGRNNSGAPHREERGGET
DEFSNVRRGRGHRMQHLSEGTKGRQVGSGGDGERWGSDRGSRGSLNEHIALVLMRLQEDMQNVLQRLQKLETLTALQAKS
STSTLQTAPQPTSQRPSWWPFEMSPGVLTFAIIWPFIAQWLVYLYYQRRRRKLNLE

[0551] NOV26m

[0552] In an alternative embodiment, a NOV26 variant is NOV26m of 1619 nucleotides (also referred to as CG51523-05_{—}166190452), shown in Table 26AB. A NOV26m variant differs from NOV26a by 4 amino acid changes, and an 11 amino acid insertion at position 161-162.

TABLE 26AB
NOV26m nucleotide sequence.

(SEQ ID NO: 271)

AAGCTTCCACCATGTTCCAGTTTCATGCAGGCTCTTGGGAAAGCTGGTGCTGCTGCTGCCTGATTCCCGCCGACAGACCT
TGGGACCGGGGCCAACACTGGCAGCTGGAGATGGCGGACACGAGATCCGTGCACGAGACTAGGTTTGAGGCGGCCGTGAA
GGTGATCCAGAGTTTGCCGAAGAATGGTTCATTCCAGCCAACAAATGAAGTGATGCTTAAATTTTATAGCTTCTATAAGC
AGGCAACTGAAGGACCCTGTAAACTTTCAAGGCCTGGATTTTGGGATCCTATTGGAAGATATAAATGGGATGCTTGGAGT
TCACTGGGTGATATGACCAAAGAGGAAGCCATGATTGCATATGTTGAAGAAATGAAAAAGATTATTGAAACTATGCCAAT
GACTGAGAAAGTTGAAGAATTGCTGCGTGTCATAGGTCCATTTTATGAAATTGTCGAGGACAAAAAGAGTGGCAGGAGTT
CTGATATAACCTCAGTCCGACTGGAGAAAATCTCTAAATGTTTAGAAGATCTTGGTAATGTTCTCACTTCTACTCCAAAC
GCCAAAACCGTTAATGGTAAAGCTGAAAGCAGTGACAGTGGAGCCGAGTCTGAGGAAGAAGAGGCCCAAGAAGAAGTGAA
AGGAGCAGAACAAAGTGATAATGATAAGAAAATGATGAAGAAGTCAGCAGACCATAAGAATTTGGAAGTCATTGTCACTA
ATGGCTATGATAAAGATGGCTTTGTTCAGGATATACAGAATGACATTCATGCCAGTTCTTCCCTGAATGGCAGAAGCACT
GAAGAAGTAAAGCCTATTGATGAAAACTTGGGGCAAACTGGAAAATCTGCTGTTTGCATTCACCAAGATATAAATGATGA
TCATGTTGAAGATGTTACAGGAATTCAGCATTTGACAAGCGATTCAGACAGTGAAGTTTACTGTGATTCTATGGAACAAT
TTGGACAAGAAGAGTCTTTAGACAGCTTTACGTCCAACAATGGACCATTTCAGTATTACTTGGGTGGTCATTCCAGTCAA
CCCATGGAAAATTCTGGATTTCGTGAAGATATTCAAGTACCTCCTGGAAATGGCAACATTGGGAATATGCAGGTGGTTGC
AGTTGAAGGAAAAGGTGAAGTCAAGCATGGAGGAGAAGATGGCAGGAATAACAGCGGAGCGCCACACCGGGAGAAGCGAG
GCGGAGAAACTGATGAATTCTCTAATGTTAGAAGAGGAAGAGGACATAGGATGCAACACTTGAGCGAAGGAACCAAGGGC
CGGCAGGTGGGAAGTGGAGATGATGGGGAGCGCTGGGGCTCCGACAGAGGGTCCCGAGGCAGCCTCAATGAGCAGATCGC
CCTCGTGCTCATGAGACTGCAGCAGGACATGCAGAATGTCCTTCAGAGACTGCAGAAACTGGAAACGCTGACTGCTTTGC
AGGCAAAATCATCAACATCAACATTGCAGACTGCTCCTCAGCCCACCTCACAGAGACCATCTTGGTGGCCCTTCGAGATG
TCTCCTGGTGTGCTAACGTTTGCCATCATATGGCCTTTTATTGCACAGTGGTTGGTGTATTTATACTATCAAAGAAGGAG
AAGAAAACTGAACCTCGAG

[0553] TABLE 26AC
hc,1 Encoded NOV26m protein sequence.

(SEQ ID NO: 272)

ASTMFQFHAGSWESWCCCCLIPADRPDRGQHWQLEMADTRSVHETRFEAAVKVIQSLPKNGSFQPTNEVMLKFYSFYKQA
TEGPCKLSRPGFWDPIGRYKWDAWSSLGDMTKEEAMIAYVEEMKKIIETMPMTEKVEELLRVIGPFYEIVEDKKSGRSSD
ITSVRLERISKCLEDLGNVLTSTPNAKTVNGKAESSDSGAESEEEEAQEEVKGAEQSDNDKKNMKKSADHKNLEVIVTNG
YDKDGFVQDIQNDIHASSSLNGRSTEEVKPIDENLGQTGKSAVCIHQDINDDHVEDVTGIQHLTSDSDSEVYCDSMEQFG
QEESLDSFTSNNGPFQYYLGGHSSQPMENSGFREDIQVPPGNGNIGNMQVVAVEGKGEVKHGGEDGRNNSGAPHREKRGG
ETDEFSNVRRGRGHRMQHLSEGTKGRQVGSGDDGERWGSDRGSRGSLNEQIALVLMRLQEDMQNVLQRLQKLETLTALQA
KSSTSTLQTAPQPTSQRPSWWPFEMSPGVLTFAIIWPEIAQWLVYLYYQRRRRKLNLE

[0554] NOV26n

[0555] In an alternative embodiment, a NOV26 variant is NOV26n of 1619 nucleotides (also referred to as CG51523-05_{—}166190467), shown in Table 26AD. Similarly to a NOV26n variant, a NOV26n variant differs from NOV26a by 4 amino acid changes, and an 11 amino acid insertion at position 161-162.

TABLE 26AD
NOV26n nucleotide sequence.

(SEQ ID NO: 273)

AAGCTTCCACCATGTTCCAGTTTCATGCAGGCTCTTGGGAAAGCTGGTGCTGCTGCTGCCTGATTCCCGCCGACAGACCT
TGGGACCGGGGCCCAAACTGGCAGCTGGAGATGGCGGACACGAGATCCGTGCACGAGACTAGGTTTGAGGCGGCCGTGAA
GGTGATCCAGAGTTTGCCGAAGAATGGTTCATTCCAGCCAACAAATGAAATGATGCTTAAATTTTATAGCTTCTATAAGC
AGGCAACTGAAGGACCCTGTAAACTTTCAAGGCCTGGATTTTGGGATCCTATTGGAAGATATAAATGGGATGCTTGGAGT
TCACTGGGTGATATGACCAAAGAGGAAGCCATGATTGCATATGTTGAAGAAATGAAAAAGATTATTGAAACTATGCCAAT
GACTGAGAAAGTTGAAGAATTGCTGCGTGTCATAGGTCCATTTTATGAAATTGTCGAGGACAAAAAGAGTGGCAGGAGTT
CTGATATAACCTCAGTCCGACTGGAGAAAATCTCTAAATGTTTAGAAGATCTTGGTAATGTTCTCACTTCTACTCCAAAC
GCCAAAACCGTTAATGGTAAAGCTGAAAGCAGTGACAGTGGAGCCGAGTCTGAGGAAGAAGAGGCCCAAGAAGAAGTGAA
AGGACCAGAACAAAGTGATAATGATAAGAAAATGATGAAGAAGTCAGCAGACCATAAGAATTTGGAAGTCATTGTCACTA
ATGGCTATGATAAGATGGCTTTGTTCAGGATATGCAGAATGACATTCATGCCAGTTCTTCCCTTGAATGGCAGAAGCACT
GAAGAAGTAAGGCCTATTGATGAAAACTTGGGGCAAACTGGAAAATCTGCTGTTTGCATTCACCAAGATATAAATGACGA
TCATGTTGAAGATGTTACAGGAATTCAGCATTTGACAAGCGATTCAGACAGTGAAGTTTACTGTGATTCTATGGAACAAT
TTGGACAAGAAGAGTCTTTAGACAGCTTTACGTCCAACAATGGACCATTTCAGTATTACTTGGGTGGTCATTCCAGTCAA
CCCATGGAAAATTCTGGATTTCGTGAAGATATTCAAGTACCTCCTGGAAATGGCAACATTGGGAATATGCAGGTGGTTGC
AGTTGAAGGAAAAGGTGAAGTCAAGCATGGAGGAGAAGATGGCAGGAATAACAGCGGAGCGCCACACCGGGAGAAGCGAG
GCGGAGAAACTGATGAATTCTCTAATGTTAGAAGAGGAAGAGGACATAGGATGCAACACTTGAGCGAAGGAACCAAGGGC
CGGCAGGTGGGAAGTGGAGGTGATGGGGAGCGCTGGGGCTCCGACAGAGGGTCCCGAGGCAGCCTCAATGAGCAGATCGC
CCTCGTGCTGATGAGACTGCAGGAGGACATCCAGAATGTCCTTCAGAGACTGCAGAAACTGGAAACGCTGACTGCTTTGC
AGGCAAAATCATCAACATCAACATTGCAGACTGCTCCTCAGCCCACCTCACAGAGACCATCTTGGTGGCCCTTCGAGATG
TCTCCTGGTGTGCTAACGTTTGCCATCATATGGCCTTTTATTGCACAGTGGTTGGTGTATTTATACTATCAAAGAAGGAG
AAGAAAACTGAACCTCGAG

[0556] TABLE 26AE
Encoded NOV26n protein sequence.

(SEQ ID NO: 274)

ASTMFQFHAGSWESWCCCCLIPADRPDRGQHWQLEMADTRSVHETRFEAAVKVIQSLPKNGSFQPTNEMMLKFYSFYKQA
TEGPCKLSRPGFWDPIGRYKWDAWSSLGDMTKEEANIAYVEEMKKIIETMPMTEKVEELLRVIGPFYEIVEDKKSGRSSD
ITSVRLEKISKCLEDLGNVLTSTPNAKTVNGKAESSDSGAESEEEEAQEEVKQAEQSDNDKKMMKKSADHKNLEVIVTNG
YDKDGFVQDMQNDIHASSSLNGRSTEEVRPIDENLGQTGKSAVCIHQDINDDHVEDVTGIQHLTSDSDSEVYCDSMEQPG
QEESLDSFTSNNGPFQYYLGGHSSQPMENSQFREDIQVPPGNGNIGNMQVVAVEGKGEVKHGGEDGRNNSGAPHREKRGG
ETDEFSNVRRGRGHRMQHLSEGTKGRQVGSGGDGERWGSDRGSRGSLNEQIALVLMRLQEDMQNVLQRLQKLETLTALQA
KSSTSTLQTAPQPTSQRPSWWPFEMSPGVLTFAIIWPFIAQWLVYLYYQRRRRKLNLE

[0557] NOV26o

[0558] In an alternative embodiment, a NOV26 variant is NOV26o of 1619 nucleotides (also referred to as CG51523-05_{—}166190475), shown in Table 26AF. A NOV26o variant differs from NOV26a by 3 amino acid changes at positions 170, 372 and 403, and an 11 amino acid insertion at position 161-162.

TABLE 26AF
NOV26o nucleotide sequence.

(SEQ ID NO: 275)

AAGCTTCCACCATGTTCCAGTTTCATGCAGGCTCTTGGGAAAGCTGGTGCTGCTGCTGCCTGATTCCCGCCGACAGACCT
TGGGACCGGGGCCAACACTGGCAGCTGGAGATGGCGGACACGAGATCCGTGCACGAGACTAGGTTTGAGGCGGCCGTGAA
GGTGATCCAGAGTTTGCCGAAGAATGGTTCATTCCAGCCAACAAATGAAATGATGCTTAAATTTTATAGCTTCTATAAGC
AGGCAACTGAAGGACCCTGTAAACTTTCAAGGCCTGGATTTTGGGATCCTATTGGAAGATATAAATGGGATGCTTGGAGT
TCACTGGGTGATATGACCAAAGAGGAAGCCATGATTGCATATGTTGAAGAAATGAAAAAGATTATTGAAACTATGCCAAT
GACTGAGAAAGTTGAAGAATTGCTGCGTGTCATAGGTCCATTTTATGAAATTGTCGAGGACAAAAAGAGTGGCAGGAGTT
CTGATATAACCTCAGTCCGACTGGAQAAAATCTCTAAATGTTTAGAAGATCTTGGTAATGTTCTCACTTCTACTCCGAAC
GCCAAAACCGTTAATGGTAAAGCTGAAAGCAGTGACAGTGGAGCCGAGTCTGAGGAAGAAGAGGCCCAAGAAGAAGTGAA
AGGAGCAGAACAAAGTGATAATGATAAGAAAATGATGAAGAAGTCAGCAGACCATAAGAATTTGGAAGTCATTGTCACTA
ATGGCTATGATAAAGATGGCTTTGTTCAGGATATACAGAATGACATTCATGCCAGTTCTTCCCTGAATGGCAGAAGCACT
GAAGAAGTAAAGCCCATTGATGAAAACTTGGGGCAAACTGGAAAATCTGCTGTTTGCATTCACCAAGATATAAATGATGA
TCATGTTGAAGATGTTACAGGAATTCAGCATTTGACAAGCGATTCAGACAGTGAAGTTTACTGTGATTCTATGGAACAAT
TTGGACAAGAAGAGTCTTTAGACAGCTTTACGTCCAACAATGGACCATTTCAGTATTACTTGGGTGGTCATTCCAGTCAA
CCCATGGAAAATTCTGGATTTCGTGAAGATATTCAAGTACCTCCTGGAAATGGCAACATTGGGAATATGCAGGTGGTTGC
AGTTGAAGGAAAAGGTGAAGTCAAGCATGGAGGAGAAGAGGGCAGGAATAACAGCGGAGCACCACACCGGGAGAAGCGAG
GCGGAGAAACTGACGAATTCTCTAATGTTAGAAGAGGAAGAGGACATAGGATGCAACACCTGAGCGAAGGAACCAAGGGC
CGGCAGGTGGGAAGTGGAGGTGATGGGGAGCGCTGGGGCTCCGACAGAGGGTCCCGAGGCAGCCTCAATGAGCAGATCGC
CCTCGTGCTGATGAGACTGCAGGAGGACATGCAGAATGTCCTTCAGAGACTGCAGAAACTGGAAACGCTGACTGCTTTGC
AGGCAAAATCATCAACATCAACATTGCAGACTGCTCCTCAGCCCACCTCACAGAGACCATCTTGGTGGCCCTTCGAGATG
TCTCCTGGTGTGCTAACGTTTGCCATCATATGGCCTTTTATTGCACAGTGGTTGGTGTATTTATACTATCAAAGAAGGAG
AAGAAAACTGAACCTCGAG

[0559] TABLE 26AG
Encoded NOV26o protein sequence.

(SEQ ID NO: 276)

ASTMFQFHAGSWESWCCCCLIPADRPWDRGQHWQLEMADTRSVHETRFEAAVKVIQSLPKNGSFQPTNEMMLKFYSFYKQ
ATEGPCKLSRPGFWDPIGRYKWDAWSSLGDMTKEEAMIAYVEEMKKIIETMPMTEKVEELLRVIGPFYEIVEDKKSGRSS
DITSVRLEKISKCLEDLGNVLTSTPNAKTVNGKAESSDSGAESEEEEAQEEVKGAEQSDNDKKMMKKSADHKNLEVIVTN
GYDKDGFVQDIQNDIHASSSLNGRSTEEVKPIDENLGQTGKSAVCIHQDINDDHVEDVTGIQHLTSDSDSEVYCDSMEQF
GQEESLDSFTSNNGPFQYYLGGHSSQPMENSGFREDIQVPPGNGNIGNMQVVAVEGKGEVKHGGEEGRNNSGAPHREKRG
GETDEFSNVRRGRGHRMQHLSEGTKGRQVGSGGDGERWGSDRGSRGSLNEQIALVLMRLQEDMQNVLQRLQKLETLTALQ
AKSSTSTLQTAPQPTSQRPSWWPFEMSPGVLTFAIIWPFIAQWLVYLYYQRRRRKLNLE

[0560] NOV26p

[0561] In an alternative embodiment, a NOV26 variant is NOV26p of 1619 nucleotides (also referred to as CG51523-05_{—}166190498), shown in Table 26AH. A NOV26p variant differs from NOV26a by 2 amino acid changes at positions 170 and 403, and an 11 amino acid insertion at position 161-162.

TABLE 26A11
NOV26p nucleotide sequence.

(SEQ ID NO: 277)

AAGCTTCCACCATGTTCCAGTTTCATGCAGGCTCTTGGGAAAGCTGGTGCTGCTGCTGCCTGATTCCCGCCGACAGACCT
TGGGACCGGGGCCAACACTGGCAGCTGGAGATGGCGGACACGAGATCCGTGCACGAGACTAGGTTTGAGGCGGCCGTGAA
GGTGATCCAGAGTTTGCCGAAGAATGGTTCATTCCAGCCAACAAATGAAATGATGCTTAAATTTTATAGCTTCTATAAGC
AGGCAACTGAAGGACCCTGTAAACTTTCAAGGCCTGGATTTTGGGATCCTATTGGAAGATATAAATGGGATGCTTGGAGT
TCACTGGGTGATATGACCAAAGAGGAAGCCATGATTGCATATGTTGAAGAAATGAAAAAGATTATTGAAACTATGCCAAT
GACTGAGAAAGTTGAAGAATTGCTGCGTGTCATAGGTCCATTTTATGAAATTGTCGAGGACAAAAAGAGTGGCAGGAGTT
CTGATATAACCTCAGTCCGACTGGAGAAAATCTCTAAATGTTTAGAAGATCTTGGTAATGTTCTCACTTCTACTCCGAAC
GCCAAAACCGTTAATGGTAAAGCTGAAAGCAGTGACAGGGAGCCGAGTCTGAGGAAGAAGAGGCCCAAGAAGAAGTGAAA
AGGAGCAGAACAAAGTGATAATGATAAGAAAATGATGAAGAAGTCAGCAGACCATAAGAATTTGGAAGTCATTGTCACTA
ATGGCTATGATAAAGATGGCTTTGTTCAGGATATACAATGACATTCATGCCAGTTCTTCCCTGAATGGCAGAAACGCACT
GAAGAAGTAAAGCCCATTGATGAAAACTTGGGGCAAACTGGAAAATCTGCTGTTTGCATTCACCAAGATATAAATGATGA
TCATGTTGAAGATGTTACAGGAATTCAGCATTTGACAAGCGATTCAGACAGTGAAGTTTACTGTGATTCTATGGAACAAT
TTGGACAAGAAGAGTCTTTAGACAGCTTTACGTCCAACAATGGACCATTTCAGTATTACTTGGGTGGTCATTCCAGTCAA
CCCATGGAAAATTCTGGATTTCGTGAAGATATTCAAGTACCTCCTGGAAATGGCAACATTGGGAATATGCAGGTGGTTGC
AGTTGAAGGAAAAGGTGAAGTCAAGCATGGAGGAGAAGATGGCAGGAATAACAGCGGAGCACCACACCGGGAGAAGCGAG
GCGGAGAAACTGACGAATTCTCTAATGTTAGAAGAGGAAGAGGACATAGGATGCAACACTTGAGCGAAGGAACCAAGGGC
CGGCAGGTGGGAAGTGGAGGTGATGGGGAGCGCTGGGGCTCCGACAGAGGGTCCCGAGGCAGCCTCAATGAGCAGATCGC
CCTCGTGCTGATGAGACTGCAGGAGGACATGCAGAATGTCCTTCAGAGACTGCAGAAACTGGAAACGCTGACTGCTTTGC
AGGCAAAATCATCAACATCAACATTGCAGACTGCTCCTCAGCCCACCTCACAGAGACCATCTTGGTGGCCCTTCGAGATG
TCTCCTGGTGTGCTAACGTTTGCCATCATATGGCCTTTTATTGCACAGTGGTTGGTGTATTTATACTATCAAAGAAGGAG
AAGAAAACTGAACCTCGAG

[0562] TABLE 26AI
Encoded NOV26p protein sequence.

(SEQ ID NO: 278)

ASTMFQFHAGSWESWCCCCLIPADRPWDRGQHWQLEMADTRSVHETRFEAAVKVIQSLPKNGSFQPTNEMMLKFYSFYKQ
ATEGPCKLSRPGFWDPIGRYKWDAWSSLGDMTKEEAMIAYVEEMKKIIETMPMTEKVEELLRVIGPFYEIVEDKKSGRSS
DITSVRLEKISKCLEDLGNSVLTSTPNAKTVNGKAESSDSGAESEEEEAQEEVKGAEQSDNKKMMKKSADHKNLEVIVTN
GYDKDGFVQDIQNDIHASSSLNGRSTEEVKPIDENLGQTGKSAVCIHQDINDDHVEDVTGIQHLTSDSDSEVYCDSMEQF
GQEESLDSFTSNNGPFQYYLGGHSSQPMENSGFREDIQVPPGNGNIGNMQVVAVEGKGEVKHGGEDGRNNSGAPHREKRG
GETDEFSNVRRGRGHRMQHLSEGTKGRQVGSGGDGERWGSDRGSRGSLNEQIALVLMRLQEDMQNVLQRLQKLETLTALQ
AKSSTSTLQTAPQPTSQRPSWWPFEMSPGVLTFAIIWPFIAQWLVYLYYQRRRRKLNLE

[0563] NOV26q

[0564] In an alternative embodiment, a NOV26 variant is NOV26q of 1586 nucleotides (also referred to as CG51523-05_{—}166190460), shown in Table 26AJ. A NOV26q variant differs from NOV26a by 3 amino acid changes at positions 170, 231 and 463.

TABLE 26AJ
NOV26q nucleotide sequence.

(SEQ ID NO: 279)

AAGCTTCCACCATGTTCCAGTTTCATGCAGGCTCTTGGGAAAGCTGGTGCTGCTGCTGCCTGATTCCCGCCGACAGACCT
TGGGACCGGGGCCAACACTGGCAGCTGGAGATGGCGGACACGAGATCCGTGCACGAGACTAGGTTTGAGGCGGCCGTGAA
GGTGATCCAGAGTTTGCCGAAGAATGGTTCATTCCAGCCAACAAATGAAATGATGCTTAAATTTTATAGCTTCTATAAGC
AGGCAACTGAAGGACCCTGTAAACTTTCAAGGCCTGGATTTTGGGATCCTATTGGAAGATATAAATGGGATGCTTGGAGT
TCACTGGGTGATATGACCAAAGAGGAAGCCATGATTGCATATGTTGAAGAAATGAAAAGATTATTGAAACTATGCCAATT
GACTGAGAAAGTTGAAGAATTGCTGCGTGTCATAGGTCCATTTTATGAAATTGTCGAGGACAAAAAGAGTGGCAGGAGTT
CTGATATAACCTCAGATCTTGGTAATGTTCTCACTTCTACTCCAAACGCCAAAACCGTTAATGGTAAAGCTGAAAGCAGT
GACAGTGGAGCCGAGTCTGAGGAAGAAGAGGCCCAAGAAGAAGTGAAAGGAGCAGAACAAAGTGATAATGATAAGAAATT
GATGAAGAAGTCAGCAGACCATAAGAATTTGGAAGTCATTGTCACTAATGGCTATGATAAAAATGGCTTTGTTCAGGATA
TACAGAATGACATTCATGCCAGTTCTTCCCTGAATGGCAGAAGCACTGAAGAAGTAAAGCCCATTGATGAAAACTTGGGG
CAAACTGGAAAATCTGCTGTTTGCATTCACCAAGATATAAATGATGATCATGTTGAAGATGTTACAGGAATTCAGCATTT
GACAAGCGATTCAGACAGTGAAGTTTACTGTGATTCTATGGAACAATTTGGACAAGAAGAGTCTTTAGACAGCTTTACGT
CCAACAATGGACCATTTCAGTATTACTTGGGTGGTCATTCCAGTCAACCCATGGAAAATTCTGGATTTCGTGAAGATATT
CAAGTACCTCCTGGAAATGGCAACATTGGGAATATGCAGGTGGTTGCAGTTGAAGGAAAAGGTGAAGTCAAGCATGGAGG
AGAAGATGGCAGGAATAACAGCGGAGCACCACACCGGGAGAAGCGAGGCGGAGAAACTGACGAATTCTCTAATGTTAGAA
GAGGAAGAGGACATAGGATGCAACACTTGAGCGAAGGAACCAAGGGCCGGCAGGTGGGAAGTGGAGGTGATGGGGAGCGC
TGGGGCTCCGACAGAGGGTCCCGAGGCAGCCTCAATGAGCAGATCGCCCTCGTGCTGATGAGACTGCAGGAGGACATGCA
GAATGTCCTTCAGAGACTGCAGAAACTGGAAACGCTGACTGCTTTGCAGGCAAATCATCAACATCAACATTGCAGACCTG
CTCCTCAGCCCACCTCACAQAGACCATCTTGGTGGCCCTTCGAGATGTCTCCTGGTGTGCTCGCGTTTGCCATCATATGG
CCTTTTATTGCACAGTGGTTGGTGTATTTATACTATCAAAGAAGGAGAAGAAAACTGAACCTCGAG

[0565] TABLE 26AK
Encoded NOV26q protein sequence.

(SEQ ID NO: 280)

ASTMFQFHAGSWESWCCCCLIPADRPWDRGQHWQLEMADTRSVHETRFEAAVKVIQSLPKNGSFQPTNEMMLKFYSFYKQA
TEGPCKLSRPGFWDPIGRYKWDAWSSLGDMTKEEAMIAYVEEMKKIIETMPMTEKVEELLRVIGPFYEIVEDKKSGRSSDI
TSDLGNVLTSTPNAKTVNGKAESSDSGAESEEEEAQEEVKGAEQSDNDKKMMKKSADHKNLEVIVTNGYDKNGFVQDIQND
IHASSSLNGRSTEEVKPIDENLGQTGKSAVCIHQDINDDHVEDVTGIQHLTSDSDSEVYCDSMEQFGQEESLDSFTSNNGP
FQYYLGGHSSQPMENSGFREDIQVPPGNGNIGNMQVVAVEGKGEVKHGGEDGRNNSGAPHREKRGGETDEFSNVRRGRGHR
MQHLSEGTKGRQVGSGGDGERWGSDRGSRGSLNEQIALVLMRLQEDMQNVLQRLQKLETLTALQAKSSTSTLQTAPQPTSQ
RPSWWPFEMSPGVLTFATIWPFIAQWLVYLYYQRRRRKLNLE

[0566] NOV26r

[0567] In an alternative embodiment, a NOV26 variant is NOV26r of 1586 nucleotides (also referred to as CG51523-05_{—}166190483), shown in Table 26AL. A NOV26r variant differs from NOV26a by 5 amino acid changes at positions 170, 342, 396, 403, and 452.

TABLE 26AL
NOV26r nucleotide sequence.

(SEQ ID NO: 281)

AAGCTTCCACCATGTTCCAGTTTCATGCAGGCTCTTCGGAAAGCTGGTGCTGCTGCTGCCTGATTCCCGCACGACGACCT
TGGGACCGGGGCCAACACTGGCAGCTGGAGATGGCGGACACGAGATCCGTGCACGAGACTAGGTTTGAGGCGGCCGTGAA
GGTGATCCAGAGTTTGCCGAAGAATGGTTCATTCCAGCCAACAAATGAAATGATGCTTAAATTTTATAGCTTCTATAAGC
AGGCAACTGAAGGACCCTGTAAACTTTCAAGGCCTGGATTTTGGGATCCTATTGGAAGATATAAATGGGATGCTTGGAGT
TCACTGGGTGATATGACCAAAGAGGAAGCCATGATTGCATATGTTGAAGAAATGAAAAAGATTATTGAAACTATGCCAAT
GACTGAGAAAGTTGAAGAATTGCTGCGTGTCATAGGTCCATTTTATGAAATTGTCGAAGACAAAAAGAGTGGCAGGAGTT
CTGATATAACCTCAGATCTTGGTAATGTTCTCACTTCTACTCCGAACGCCAAAACCGTTAATGGTAAAGCTGAAAGCAGT
GACAGTGGAGCCGAGTCTGAGGAAGAAGAGGCCCAAGAAGAAGTGAAAGGAGCAGAACAAAGTGATAATGATAAGAAAAT
GATGAAGAAGTCAGCAGACCATAAGAATTTGGAAGTCATTGTCACTAATGGCTATGATAAAGATGGCTTTGTTCAGGATA
TACAGAATGACATTCATGCCAGTTCTTCCCTGAATGGCAGAAGCACTGAAGAAGTAAAGCCCATTGATGAAAACTTGGGG
CAAACTGGAAAATCTGCTGTTTGCATTCACCAAGATATAAATGATGATCATGTTGAAGATGTTACAGGAATTCAGCATTT
GACAAGCGATTCAGACAGTGAAGTTACTGTGATTCTATGGAACAATTTGGACAAGAAGAGTCTTTAGACAGCTTTACCGT
CCAACAATGGACCATTTCAGTATTACTTGGGTGGTCATTCCAGTCAACCCATGGAAAATTCTGGATTTCGTGAATATATT
CAAGTACCTCCTGGAAATGGCAACATTGGGAATATGCAGGTGGTTGCAGTTGAAGGAAAAGGTGAAGTCAAGCATGGAGG
AGAAGATGGCAGGAATAACAGCGGAGCACCACACCGGAGAAGCGAGGCGGAGAAACTGACGAATTCTCTAATGTTTGGAA
GAGGAAGAGGACATAGGATGCAACACTTGAGCGAAGGAACCAAGGGCCGGCAGGTGGGAAGTGGAGGTGATGGGGAGCGC
TGGGGCTCCGACAGAGGGTCCCGAGGCAGCCTCAATGAGCAGATCGCCCTCGTGCTGATGAGACTGCAGGAGGACATGCA
GAATGTCCTTCAGAGACTGCAGAAACTGGAAACGCCGACTGCTTTGCAGGCAAAATCATCAACATCAACATTGCAGACTG
CTCCTCAGCCCACCTCACAGAGACCATCTTGGTGGCCCTTCGAGATGTCTCCTGGTGTGCTAACGTTTGCCATCATATGG
CCTTTTATTGCACAGTGGTTGGTGTATTTATACTATCAAAGAAGGAGAAGAAAACTGAACCTCGAG

[0568] TABLE 26AM
Encoded NOV26r protein sequence.

(SEQ ID NO: 282)

ASTMFQFHFAGSWESWCCCCLIPADRPWDRGQHWQLEMADTRSVHETRFEAAVKVIQSLPKNSFQPTNEMMLKFYSFYKQ
ATEGPCKLSRPGFWDPIGRYKWDAWSSLGDMTKEEAMIAYVEEMKKIIETMPMTEKVEELLRVIGPFYEIVEDKKSGRSS
DITSDLGNVLTSTPNAKTVNGKAESSDSGAESEEEEAQEEVKGAEQSDNDKKMMKKSADHKNLEVIVTNGYDKDGFVQDI
QNDIHASSSLNGRSTEEVKPIDENLGQTGKSAVCIHQDINDDHVEDVTGIQHLTSDSDSEVYCDSMEQFGQEESLDSFTS
NNGPFQYYLGGHSSQPMENSGFREYIQVPPGNGNIGNMQVVAVEGKGEVKHGGEDGRNNSGAPHREKRGGETDEFSNVGR
GRGHRMQHLSEGTKGRQVGSGGDGERWGSDRGSRGSLNEQIALVLMRLQEDMQNVLQRLQKLETPTALQAKSSTSTLQTA
QPTSQRPSWWPFEMSPGVLTFAIIWPFIAQWLVYLYYQRRRKLNLE

### Example B

### Sequencing Methodology and Identification of NOVX Clones

[0569] 1. GeneCalling™ Technology:

[0570] This is a proprietary method of performing differential gene expression profiling between two or more samples developed at CuraGen and described by Shimkets, et al., “Gene expression analysis by transcript profiling coupled to a gene database query” Nature Biotechnology 17:198-803 (1999). cDNA was derived from various human samples representing multiple tissue types, normal and diseased states, physiological states, and developmental states from different donors. Samples were obtained as whole tissue, primary cells or tissue cultured primary cells or cell lines. Cells and cell lines may have been treated with biological or chemical agents that regulate gene expression, for example, growth factors, chemokines or steroids. The cDNA thus derived was then digested with up to as many as 120 pairs of restriction enzymes and pairs of linker-adaptors specific for each pair of restriction enzymes were ligated to the appropriate end. The restriction digestion generates a mixture of unique cDNA gene fragments. Limited PCR amplification is performed with primers homologous to the linker adapter sequence where one primer is biotinylated and the other is fluorescently labeled. The doubly labeled material is isolated and the fluorescently labeled single strand is resolved by capillary gel electrophoresis. A computer algorithm compares the electropherograms from an experimental and control group for each of the restriction digestions. This and additional sequence-derived information is used to predict the identity of each differentially expressed gene fragment using a variety of genetic databases. The identity of the gene fragment is confirmed by additional, gene-specific competitive PCR or by isolation and sequencing of the gene fragment.

[0571] 2. SeqCalling™ Technology:

[0572] cDNA was derived from various human samples representing multiple tissue types, normal and diseased states, physiological states, and developmental states from different donors. Samples were obtained as whole tissue, primary cells or tissue cultured primary cells or cell lines. Cells and cell lines may have been treated with biological or chemical agents that regulate gene expression, for example, growth factors, chemokines or steroids. The cDNA thus derived was then sequenced using CuraGen's proprietary SeqCalling technology. Sequence traces were evaluated manually and edited for corrections if appropriate. cDNA sequences from all samples were assembled together, sometimes including public human sequences, using bioinformatic programs to produce a consensus sequence for each assembly. Each assembly is included in CuraGen Corporation's database. Sequences were included as components for assembly when the extent of identity with another component was at least 95% over 50 bp. Each assembly represents a gene or portion thereof and includes information on variants, such as splice forms single nucleotide polymorphisms (SNPs), insertions, deletions and other sequence variations.

[0573] 3. PathCalling™ Technology:

[0574] The NOVX nucleic acid sequences are derived by laboratory screening of cDNA library by the two-hybrid approach. cDNA fragments covering either the full length of the DNA sequence, or part of the sequence, or both, are sequenced. In silico prediction was based on sequences available in CuraGen Corporation's proprietary sequence databases or in the public human sequence databases, and provided either the full length DNA sequence, or some portion thereof.

[0575] The laboratory screening was performed using the methods summarized below:

[0576] cDNA libraries were derived from various human samples representing multiple tissue types, normal and diseased states, physiological states, and developmental states from different donors. Samples were obtained as whole tissue, primary cells or tissue cultured primary cells or cell lines. Cells and cell lines may have been treated with biological or chemical agents that regulate gene expression, for example, growth factors, chemokines or steroids. The cDNA thus derived was then directionally cloned into the appropriate two-hybrid vector (Gal4-activation domain (Gal4-AD) fusion). Such cDNA libraries as well as commercially available cDNA libraries from Clontech (Palo Alto, Calf.) were then transferred from E. coli into a CuraGen Corporation proprietary yeast strain (disclosed in U.S. Pat. Nos. 6,057,101 and 6,083,693, incorporated herein by reference in their entireties).

[0577] Gal4-binding domain (Gal4-BD) fusions of a CuraGen Corportion proprietary library of human sequences was used to screen multiple Gal4-AD fusion cDNA libraries resulting in the selection of yeast hybrid diploids in each of which the Gal4-AD fusion contains an individual cDNA. Each sample was amplified using the polymerase chain reaction (PCR) using non-specific primers at the cDNA insert boundaries. Such PCR product was sequenced; sequence traces were evaluated manually and edited for corrections if appropriate. cDNA sequences from all samples were assembled together, sometimes including public human sequences, using bioinformatic programs to produce a consensus sequence for each assembly. Each assembly is included in CuraGen Corporation's database. Sequences were included as components for assembly when the extent of identity with another component was at least 95% over 50 bp. Each assembly represents a gene or portion thereof and includes information on variants, such as splice forms single nucleotide polymorphisms (SNPs), insertions, deletions and other sequence variations.

[0578] Physical clone: the cDNA fragment derived by the screening procedure, covering the entire open reading frame is, as a recombinant DNA, cloned into pACT2 plasmid (Clontech) used to make the cDNA library. The recombinant plasmid is inserted into the host and selected by the yeast hybrid diploid generated during the screening procedure by the mating of both CuraGen Corporation proprietary yeast strains N106′ and YULH (U.S. Pat. No. 6,057,101 and 6,083,693).

[0579] 4. RACE:

[0580] Techniques based on the polymerase chain reaction such as rapid amplification of cDNA ends (RACE), were used to isolate or complete the predicted sequence of the cDNA of the invention. Usually multiple clones were sequenced from one or ,more human samples to derive the sequences for fragments. Various human tissue samples from different donors were used for the RACE reaction. The sequences derived from these procedures were included in the SeqCalling Assembly process described in preceding paragraphs.

[0581] 5. Exon Linking:

[0582] The NOVX target sequences identified in the present invention were subjected to the exon linking process to confirm the sequence. PCR primers were designed by starting at the most upstream sequence available, for the forward primer, and at the most downstream sequence available for the reverse primer. In each case, the sequence was examined, walking inward from the respective termini toward the coding sequence, until a suitable sequence that is either unique or highly selective was encountered, or, in the case of the reverse primer, until the stop codon was reached. Such primers were designed based on in silico predictions for the full length cDNA, part (one or more exons) of the DNA or protein sequence of the target sequence, or by translated homology of the predicted exons to closely related human sequences from other species. These primers were then employed in PCR amplification based on the following pool of human cDNAs: adrenal gland, bone marrow, brain—amygdala, brain—cerebellum, brain—hippocampus, brain—substantia nigra, brain—thalamus, brain—whole, fetal brain, fetal kidney, fetal liver, fetal lung, heart, kidney, lymphoma—Raji, mammary gland, pancreas, pituitary gland, placenta, prostate, salivary gland, skeletal muscle, small intestine, spinal cord, spleen, stomach, testis, thyroid, trachea, uterus. Usually the resulting amplicons were gel purified, cloned and sequenced to high redundancy. The PCR product derived from exon linking was cloned into the pCR2.1 vector from Invitrogen. The resulting bacterial clone has an insert covering the entire open reading frame cloned into the pCR2.1 vector. The resulting sequences from all clones were assembled with themselves, with other fragments in CuraGen Corporation's database and with public ESTs. Fragments and ESTs were included as components for an assembly when the extent of their identity with another component of the assembly was at least 95% over 50 bp. In addition, sequence traces were evaluated manually and edited for corrections if appropriate. These procedures provide the sequence reported herein.

[0583] 6. Physical Clone:

[0584] Exons were predicted by homology and the intron/exon boundaries were determined using standard genetic rules. Exons were further selected and refined by means of similarity determination using multiple BLAST (for example, tBlastN, BlastX, and BlastN) searches, and, in some instances, GeneScan and Grail. Expressed sequences from both public and proprietary databases were also added when available to further define and complete the gene sequence. The DNA sequence was then manually corrected for apparent inconsistencies thereby obtaining the sequences encoding the full-length protein.

[0585] The PCR product derived by exon linking, covering the entire open reading frame, was cloned into the pCR2.1 vector from Invitrogen to provide clones used for expression and screening purposes.

### Example C

### Quantitative Expression Analysis of Clones in Various Cells and Tissues

[0586] The quantitative expression of various clones was assessed using microtiter plates containing RNA samples from a variety of normal and pathology-derived cells, cell lines and tissues using real time quantitative PCR (RTQ PCR). RTQ PCR was performed on an Applied Biosystems ABI PRISMS® 7700 or an ABI PRISM® 7900 HT Sequence Detection System. Various collections of samples are assembled on the plates, and referred to as Panel 1 (containing normal tissues and cancer cell lines), Panel 2 (containing samples derived from tissues from normal and cancer sources), Panel 3 (containing cancer cell lines), Panel 4 (containing cells and cell lines from normal tissues and cells related to inflammatory conditions), Panel 5D/5I (containing human tissues and cell lines with an emphasis on metabolic diseases), AI_comprehensive_panel (containing normal tissue and samples from autoimmune/autoinflammatory diseases), Panel CNSD.01 (containing samples from normal and diseased brains) and CNS_neurodegeneration_panel (containing samples from normal and Alzheimer's diseased brains).

[0587] RNA integrity from all samples is controlled for quality by visual assessment of agarose gel electropherograms using 28S and 18S ribosomal RNA staining intensity ratio as a guide (2:1 to 2.5:1 28 s: 18 s) and the absence of low molecular weight RNAs that would be indicative of degradation products. Samples are controlled against genomic DNA contamination by RTQ PCR reactions run in the absence of reverse transcriptase using probe and primer sets designed to amplify across the span of a single exon.

[0588] First, the RNA samples were normalized to reference nucleic acids such as constitutively expressed genes (for example, β-acfin and GAPDH). Normalized RNA (5 ul) was converted to cDNA and analyzed by RTQ-PCR using One Step RT-PCR Master Mix Reagents (Applied Biosystems; Catalog No.4309169) and gene-specific primers according to the manufacturer's instructions.

[0589] In other cases, non-normalized RNA samples were converted to single strand cDNA (sscDNA) using Superscript II (Invitrogen Corporation; Catalog No. 18064-147) and random hexamers according to the manufacturer's instructions. Reactions containing up to 10 μg of total RNA were performed in a volume of 20 μl and incubated for 60 minutes at 42° C. This reaction can be scaled up to 50 μg of total RNA in a final volume of 100 μl. sscDNA samples are then normalized to reference nucleic acids as described previously, using 1× TaqMan® Universal Master mix (Applied Biosystems; catalog No. 4324020), following the manufacturer's instructions.

[0590] Probes and primers were designed for each assay according to Applied Biosystems Primer Express Software package (version I for Apple Computer's Macintosh Power PC) or a similar algorithm using the target sequence as input. Default settings were used for reaction conditions and the following parameters were set before selecting primers: primer concentration=250 nM, primer melting temperature (Tm) range=58°−60° C., primer optimal Tm=59° C., maximum primer difference=2° C., probe does not have 5′G, probe Tm must be 10° C. greater than primer Tm, amplicon size 75 bp to 100 bp. The probes and primers selected (see below) were synthesized by Synthegen (Houston, Tex., USA). Probes were double purified by HPLC to remove uncoupled dye and evaluated by mass spectroscopy to verify coupling of reporter and quencher dyes to the 5′ and 3′ ends of the probe, respectively. Their final concentrations were: forward and reverse primers, 900 nM each, and probe, 200 nM.

[0591] PCR conditions: When working with RNA samples, normalized RNA from each tissue and each cell line was spotted in each well of either a 96 well or a 384-well PCR plate (Applied Biosystems). PCR cocktails included either a single gene specific probe and primers set, or two multiplexed probe and primers sets (a set specific for the target clone and another gene-specific set multiplexed with the target probe). PCR reactions were set up using TaqMan® One-Step RT-PCR Master Mix (Applied Biosystems, Catalog No. 4313803) following manufacturer's instructions. Reverse transcription was performed at 48° C. for 30 minutes followed by amplification/PCR cycles as follows: 95° C. 10 min, then 40 cycles of 95° C. for 15 seconds, 60° C. for 1 minute. Results were recorded as CT values (cycle at which a given sample crosses a threshold level of fluorescence) using a log scale, with the difference in RNA concentration between a given sample and the sample with the lowest CT value being represented as 2 to the power of delta CT. The percent relative expression is then obtained by taking the reciprocal of this RNA difference and multiplying by 100.

[0592] When working with sscDNA samples, normalized sscDNA was used as described previously for RNA samples. PCR reactions containing one or two sets of probe and primers were set up as described previously, using 1× TaqMan® Universal Master mix (Applied Biosystems; catalog No. 4324020), following the manufacturer's instructions. PCR amplification was performed as follows: 95° C. 10 min, then 40 cycles of 95° C. for 15 seconds, 60° C. for 1 minute. Results were analyzed and processed as described previously.

[0593] Panels 1, 1.1, 1.2, and 1.3D

[0594] The plates for Panels 1, 1.1, 1.2 and 1.3D include 2 control wells (genomic DNA control and chemistry control) and 94 wells containing cDNA from various samples. The samples in these panels are broken into 2 classes: samples derived from cultured cell lines and samples derived from primary normal tissues. The cell lines are derived from cancers of the following types: lung cancer, breast cancer, melanoma, colon cancer, prostate cancer, CNS cancer, squamous cell carcinoma, ovarian cancer, liver cancer, renal cancer, gastric cancer and pancreatic cancer. Cell lines used in these panels are widely available through the American Type Culture Collection (ATCC), a repository for cultured cell lines, and were cultured using the conditions recommended by the ATCC. The normal tissues found on these panels are comprised of samples derived from all major organ systems from single adult individuals or fetuses. These samples are derived from the following organs: adult skeletal muscle, fetal skeletal muscle, adult heart, fetal heart, adult kidney, fetal kidney, adult liver, fetal liver, adult lung, fetal lung, various regions of the brain, the spleen, bone marrow, lymph node, pancreas, salivary gland, pituitary gland, adrenal gland, spinal cord, thymus, stomach, small intestine, colon, bladder, trachea, breast, ovary, uterus, placenta, prostate, testis and adipose.

[0595] In the results for Panels 1, 1.1, 1.2 and 1.3D, the following abbreviations are used:

[0596] ca.=carcinoma,

[0597] *=established from metastasis,

[0598] met=metastasis,

[0599] s cell var=small cell variant,

[0600] non-s=non-sm=non-small,

[0601] squam=squamous,

[0602] pl. eff pl effusion=pleural effusion,

[0603] glio=glioma,

[0604] astro=astrocytoma, and

[0605] neuro=neuroblastoma.

[0606] General_screening_panel_v1.4, v1.5 and v1.6

[0607] The plates for Panels 1.4, v1.5 and v1.6 include two control wells (genomic DNA control and chemistry control) and 94 wells containing cDNA from various samples. The samples in Panels 1.4, v1.5 and v1.6 are broken into 2 classes: samples derived from cultured cell lines and samples derived from primary normal tissues. The cell lines are derived from cancers of the following types: lung cancer, breast cancer, melanoma, colon cancer, prostate cancer, CNS cancer, squamous cell carcinoma, ovarian cancer, liver cancer, renal cancer, gastric cancer and pancreatic cancer. Cell lines used in Panels 1.4, v1.5 and v1.6 are widely available through the American Type Culture Collection (ATCC), a repository for cultured cell lines, and were cultured using the conditions recommended by the ATCC. The normal tissues found on Panels 1.4, v1.5 and v1.6 are comprised of pools of samples derived from all major organ systems from 2 to 5 different adult individuals or fetuses. These samples are derived from the following organs: adult skeletal muscle, fetal skeletal muscle, adult heart, fetal heart, adult kidney, fetal kidney, adult liver, fetal liver, adult lung, fetal lung, various regions of the brain, the spleen, bone marrow, lymph node, pancreas, salivary gland, pituitary gland, adrenal gland, spinal cord, thymus, stomach, small intestine, colon, bladder, trachea, breast, ovary, uterus, placenta, prostate, testis and adipose. Abbreviations are as described for Panels 1, 1.1, 1.2, and 1.3D.

[0608] Panels 2D, 2.2, 2.3 and 2.4

[0609] The plates for Panels 2D, 2.2, 2.3 and 2.4 generally include two control wells and 94 test samples composed of RNA or cDNA isolated from human tissue procured by surgeons working in close cooperation with the National Cancer Institute's Cooperative Human Tissue Network (CHTN) or the National Disease Research Initiative (NDRI) or from Ardais or Clinomics. The tissues are derived from human malignancies and in cases where indicated many malignant tissues have “matched margins” obtained from noncancerous tissue just adjacent to the tumor. These are termed normal adjacent tissues and are denoted “NAT” in the results below. The tumor tissue and the “matched margins” are evaluated by two independent pathologists (the surgical pathologists and again by a pathologist at NDRI/CHTN/Ardais/Clinomics). Unmatched RNA samples from tissues without malignancy (normal tissues) were also obtained from Ardais or Clinomics. This analysis provides a gross histopathological assessment of tumor differentiation grade. Moreover, most samples include the original surgical pathology report that provides information regarding the clinical stage of the patient. These matched margins are taken from the tissue surrounding (i.e. immediately proximal) to the zone of surgery (designated “NAT”, for normal adjacent tissue, in Table RR). In addition, RNA and cDNA samples were obtained from various human tissues derived from autopsies performed on elderly people or sudden death victims (accidents, etc.). These tissues were ascertained to be free of disease and were purchased from various commercial sources such as Clontech (Palo Alto, Calif.), Research Genetics, and Invitrogen. General oncology screening panel_v_{—}2.4 is an updated version of Panel 2D.

[0610] HASS Panel v 1.0

[0611] The HASS panel v 1.0 plates are comprised of 93 cDNA samples and two controls. Specifically, 81 of these samples are derived from cultured human cancer cell lines that had been subjected to serum starvation, acidosis and anoxia for different time periods as well as controls for these treatments, 3 samples of human primary cells, 9 samples of malignant brain cancer (4 medulloblastomas and 5 glioblastomas) and 2 controls. The human cancer cell lines are obtained from ATCC (American Type Culture Collection) and fall into the following tissue groups: breast cancer, prostate cancer, bladder carcinomas, pancreatic cancers and CNS cancer cell lines. These cancer cells are all cultured under standard recommended conditions. The treatments used (serum starvation, acidosis and anoxia) have been previously published in the scientific literature. The primary human cells were obtained from Clonetics (Walkersville, Md.) and were grown in the media and conditions recommended by Clonetics. The malignant brain cancer samples are obtained as part of a collaboration (Henry Ford Cancer Center) and are evaluated by a pathologist prior to CuraGen receiving the samples. RNA was prepared from these samples using the standard procedures. The genomic and chemistry control wells have been described previously.

[0612] ARDAIS Panel v 1.0

[0613] The plates for ARDAIS panel v 1.0 generally include 2 control wells and 22 test samples composed of RNA isolated from human tissue procured by surgeons working in close cooperation with Ardais Corporation. The tissues are derived from human lung malignancies (lung adenocarcinoma or lung squamous cell carcinoma) and in cases where indicated many malignant samples have “matched margins” obtained from noncancerous lung tissue just adjacent to the tumor. These matched margins are taken from the tissue surrounding (i.e. immediately proximal) to the zone of surgery (designated “NAT”, for normal adjacent tissue) in the results below. The tumor tissue and the “matched margins” are evaluated by independent pathologists (the surgical pathologists and again by a pathologist at Ardais). Unmatched malignant and non-malignant RNA samples from lungs were also obtained from Ardais. Additional information from Ardais provides a gross histopathological assessment of tumor differentiation grade and stage. Moreover, most samples include the original surgical pathology report that provides information regarding the clinical state of the patient.

[0614] Panels 3D, 3.1 and 3.2

[0615] The plates of Panel 3D, 3. 1, and 3.2 are comprised of 94 cDNA samples and two control samples. Specifically, 92 of these samples are derived from cultured human cancer cell lines, 2 samples of human primary cerebellar tissue and 2 controls. The human cell lines are generally obtained from ATCC (American Type Culture Collection), NCI or the German tumor cell bank and fall into the following tissue groups: Squamous cell carcinoma of the tongue, breast cancer, prostate cancer, melanoma, epidermoid carcinoma, sarcomas, bladder carcinomas, pancreatic cancers, kidney cancers, leukemias/lymphomas, ovarian/uterine/cervical, gastric, colon, lung and CNS cancer cell lines. In addition, there are two independent samples of cerebellum. These cells are all cultured under standard recommended conditions and RNA extracted using the standard procedures. The cell lines in panel 3D, 3.1, 3.2, 1, 1.1, 1.2, 1.3D, 1.4, 1.5, and 1.6 are of the most common cell lines used in the scientific literature.

[0616] Panels 4D, 4R, and 4.1D

[0617] Panel 4 includes samples on a 96 well plate (2 control wells, 94 test samples) composed of RNA (Panel 4R) or cDNA (Panels 4D/4.1D) isolated from various human cell lines or tissues related to inflammatory conditions. Total RNA from control normal tissues such as colon and lung (Stratagene, La Jolla, Calif.) and thymus and kidney (Clontech) was employed. Total RNA from liver tissue from cirrhosis patients and kidney from lupus patients was obtained from BioChain (Biochain Institute, Inc., Hayward, Calif.). Intestinal tissue for RNA preparation from patients diagnosed as having Crohn's disease and ulcerative colitis was obtained from the National Disease Research Interchange (NDRI) (Philadelphia, Pa.).

[0618] Astrocytes, lung fibroblasts, dermal fibroblasts, coronary artery smooth muscle cells, small airway epithelium, bronchial epithelium, microvascular dermal endothelial cells,, microvascular lung endothelial cells, human pulmonary aortic endothelial cells, human umbilical vein endothelial cells were all purchased from Clonetics (Walkersville, Md.) and grown in the media supplied for these cell types by Clonetics. These primary cell types were activated with various cytokines or combinations of cytokines for 6 and/or 12-14 hours, as indicated. The following cytokines were used; IL-1 beta at approximately 1-5 ng/ml, TNF alpha at approximately 5-10 ng/ml, IFN gamma at approximately 20-50 ng/ml, IL-4 at approximately 5-10 ng/ml, IL-9 at approximately 5-10 ng/ml, IL-13 at approximately 5-10ng/ml. Endothelial cells were sometimes starved for various times by culture in the basal media from Clonetics with 0.1% serum.

[0619] Mononuclear cells were prepared from blood of employees at CuraGen Corporation, using Ficoll. LAK cells were prepared from these cells by culture in DMEM 5% FCS (Hyclone), 100 μM non essential amino acids (Gibco/Life Technologies, Rockville, Md.), 1 mM sodium pyruvate (Gibco), mercaptoethanol 5.5×10⁻⁵ M (Gibco), and 10 mM Hepes (Gibco) and Interleukin 2 for 4-6 days. Cells were then either activated with 10-20ng/ml PMA and 1-2 μg/ml ionomycin, IL-12 at 5-10 ng/ml, IFN gamma at 20-50 ng/ml and IL-18 at 5-10 ng/ml for 6 hours. In some cases, mononuclear cells were cultured for 4-5 days in DMEM 5% FCS (Hyclone), 100 μM non essential amino acids (Gibco), 1 mM sodium pyruvate (Gibco), mercaptoethanol 5.5×10⁻⁵ M (Gibco), and 10 mM Hepes (Gibco) with PHA (phytohemagglutinin) or PWM (pokeweed mitogen) at approximately 5 μg/ml. Samples were taken at 24, 48 and 72 hours for RNA preparation. MLR (mixed lymphocyte reaction) samples were obtained by taking blood from two donors, isolating the mononuclear cells using Ficoll and mixing the isolated mononuclear cells 1:1 at a final concentration of approximately 2×10⁶ cells/ml in DMEM 5% FCS (Hyclone), 100 μM non essential amino acids (Gibco), 1 mM sodium pyruvate (Gibco), mercaptoethanol (5.5×10⁻⁵ M) (Gibco), and 10 mM Hepes (Gibco). The MLR was cultured and samples taken at various time points ranging from 1- 7 days for RNA preparation.

[0620] Monocytes were isolated from mononuclear cells using CD14 Miltenyi Beads, +ve VS selection columns and a Vario Magnet according to the manufacturer's instructions. Monocytes were differentiated into dendritic cells by culture in DMEM 5% fetal calf serum (FCS) (Hyclone, Logan, Utah), 100 μM non essential amino acids (Gibco), 1 mM sodium pyruvate (Gibco), mercaptoethanol 5.5×10⁻⁵ M (Gibco), and 10 mM Hepes (Gibco), 50 ng/ml GMCSF and 5 ng/ml IL-4 for 5-7 days. Macrophages were prepared by culture of monocytes for 5-7 days in DMEM 5% FCS (Hyclone), 100 μM non essential amino acids (Gibco), 1 mM sodium pyruvate (Gibco), mercaptoethanol 5.5×10−5 M (Gibco), 10 mM Hepes (Gibco) and 10% AB Human Serum or MCSF at approximately 50 ng/ml. Monocytes, macrophages and dendritic cells were stimulated for 6 and 12-14 hours with lipopolysaccharide (LPS) at 100 ng/ml. Dendritic cells were also stimulated with anti-CD40 monoclonal antibody (Pharmingen) at 10 μg/ml for 6 and 12-14 hours.

[0621] CD4 lymphocytes, CD8 lymphocytes and NK cells were also isolated from mononuclear cells using CD4, CD8 and CD56 Miltenyi beads, positive VS selection columns and a Vario Magnet according to the manufacturer's instructions. CD45RA and CD45RO CD4 lymphocytes were isolated by depleting mononuclear cells of CD8, CD56, CD14 and CD19 cells using CD8, CD56, CD14 and CD19 Miltenyi beads and positive selection. CD45RO beads were then used to isolate the CD45RO CD4 lymphocytes with the remaining cells being CD45RA CD4 lymphocytes. CD45RA CD4, CD45RO CD4 and CD8 lymphocytes were placed in DMEM 5% FCS (Hyclone), 100 μM non essential amino acids (Gibco), 1 mM sodium pyruvate (Gibco), mercaptoethanol 5.5×10⁻⁵ M (Gibco), and 10 mM Hepes (Gibco) and plated at 10⁶ cells/ml onto Falcon 6 well tissue culture plates that had been coated overnight with 0.5 μg/ml anti-CD28 (Pharmingen) and 3 ug/ml anti-CD3 (OKT3, ATCC) in PBS. After 6 and 24 hours, the cells were harvested for RNA preparation. To prepare chronically activated CD8 lymphocytes, we activated the isolated CD8 lymphocytes for 4 days on anti-CD28 and anti-CD3 coated plates and then harvested the cells and expanded them in DMEM 5% FCS (Hyclone), 100 μM non essential amino acids (Gibco), 1 mM sodium pyruvate (Gibco), mercaptoethanol 5.5×10⁻⁵ M (Gibco), and 10 mM Hepes (Gibco) and IL-2. The expanded CD8 cells were then activated again with plate bound anti-CD3 and anti-CD28 for 4 days and expanded as before. RNA was isolated 6 and 24 hours after the second activation and after 4 days of the second expansion culture. The isolated NK cells were cultured in DMEM 5% FCS (Hyclone), 100 μM non essential amino acids (Gibco), 1 mM sodium pyruvate (Gibco), mercaptoethanol 5.5×10⁻⁵ M (Gibco), and 10 mM Hepes (Gibco) and IL-2 for 4-6 days before RNA was prepared.

[0622] To obtain B cells, tonsils were procured from NDRI. The tonsil was cut up with sterile dissecting scissors and then passed through a sieve. Tonsil cells were then spun down and resupended at 10⁶ cells/ml in DMEM 5% FCS (Hyclone), 100 μM non essential amino acids (Gibco), 1 mM sodium pyruvate (Gibco), mercaptoethanol 5.5×10−5 M (Gibco), and 10 mM Hepes (Gibco). To activate the cells, we used PWM at 5 μg/ml or anti-CD40 (Pharmingen) at approximately 10 μg/ml and IL-4 at 5-10 ng/ml. Cells were harvested for RNA preparation at 24, 48 and 72 hours.

[0623] To prepare the primary and secondary Th1/Th2 and Tr1 cells, six-well Falcon plates were coated overnight with 10 μg/ml anti-CD28 (Pharmingen) and 2 μg/ml OKT3 (ATCC), and then washed twice with PBS. Umbilical cord blood CD4 lymphocytes (Poietic Systems, German Town, Md.) were cultured at 10⁵-10⁶ cells/ml in DMEM 5% FCS (Hyclone), 100 μM non essential amino acids (Gibco), 1 mM sodium pyruvate (Gibco), mercaptoethanol 5.5×10⁻⁵ M (Gibco), 10 mM Hepes (Gibco) and IL-2 (4 ng/ml). IL-12 (5 ng/ml) and anti-IL4 (1 μg/ml) were used to direct to Th 1, while IL-4 (5 ng/ml) and anti-IFN gamma (1 μg/ml) were used to direct to Th2 and IL-10 at 5 ng/ml was used to direct to Tr1. After 4-5 days, the activated Th1, Th2 and Tr1 lymphocytes were washed once in DMEM and expanded for 4-7 days in DMEM 5% FCS (Hyclone), 100 μM non essential amino acids (Gibco), 1 mM sodium pyruvate (Gibco), mercaptoethanol 5.5×10⁻⁵ M (Gibco), 10 mM Hepes (Gibco) and IL-2 (1 ng/ml). Following this, the activated Th1, Th2 and Tr1 lymphocytes were re-stimulated for 5 days with anti-CD28/OKT3 and cytokines as described above, but with the addition of anti-CD95L (1 μg/ml) to prevent apoptosis. After 4-5 days, the Th1, Th2 and Tr1 lymphocytes were washed and then expanded again with IL-2 for 4-7 days. Activated Th1 and Th2 lymphocytes were maintained in this way for a maximum of three cycles. RNA was prepared from primary and secondary Th1, Th2 and Tr1 after 6 and 24 hours following the second and third activations with plate bound anti-CD3 and anti-CD28 mAbs and 4 days into the second and third expansion cultures in Interleukin 2.

[0624] The following leukocyte cells lines were obtained from the ATCC: Ramos, EOL-1, KU-812. EOL cells were further differentiated by culture in 0.1 mM dbcAMP at 5×10⁵ cells/ml for 8 days, changing the media every 3 days and adjusting the cell concentration to 5×10⁵ cells/ml. For the culture of these cells, we used DMEM or RPMI (as recommended by the ATCC), with the addition of 5% FCS (Hyclone), 100 μM non essential amino acids (Gibco), 1 mM sodium pyruvate (Gibco), mercaptoethanol 5.5×10⁻⁵ M (Gibco), 10 mM Hepes (Gibco). RNA was either prepared from resting cells or cells activated with PMA at 10 ng/ml and ionomycin at 1 μg/ml for 6 and 14 hours. Keratinocyte line CCD106 and an airway epithelial tumor line NCI-H292 were also obtained from the ATCC. Both were cultured in DMEM 5% FCS (Hyclone), 100 μM non essential amino acids (Gibco), 1 mM sodium pyruvate (Gibco), mercaptoethanol 5.5×10⁻⁵ M (Gibco), and 10 mM Hepes (Gibco). CCD1106 cells were activated for 6 and 14 hours with approximately 5 ng/ml TNF alpha and 1 ng/ml IL-1 beta, while NCI-H292 cells were activated for 6 and 14 hours with the following cytokines: 5 ng/ml IL-4, 5 ng/ml IL-9, 5 ng/ml IL-13 and 25 ng/ml IFN gamma.

[0625] For these cell lines and blood cells, RNA was prepared by lysing approximately 10⁷ cells/ml using Trizol (Gibco BRL). Briefly, 1/10 volume of bromochloropropane (Molecular Research Corporation) was added to the RNA sample, vortexed and after 10 minutes at room temperature, the tubes were spun at 14,000 rpm in a Sorvall SS34 rotor. The aqueous phase was removed and placed in a 15 ml Falcon Tube. An equal volume of isopropanol was added and left at −20° C. overnight. The precipitated RNA was spun down at 9,000 rpm for 15 min in a Sorvall SS34 rotor and washed in 70% ethanol. The pellet was redissolved in 300 μl of RNAse-free water and 35 μl buffer (Promega) 5 μl DTT, 7 μl RNAsin and 8 μl DNAse were added. The tube was incubated at 37° C. for 30 minutes to remove contaminating genomic DNA, extracted once with phenol chloroform and re-precipitated with 1/10 volume of 3M sodium acetate and 2 volumes of 100% ethanol. The RNA was spun down and placed in RNAse free water. RNA was stored at −80° C.

[0626] AI_Comprehensive Panel_v1.0

[0627] The plates for AI_comprehensive panel_v1.0 include two control wells and 89 test samples comprised of cDNA isolated from surgical and postmortem human tissues obtained from the Backus Hospital and Clinomics (Frederick, Md.). Total RNA was extracted from tissue samples from the Backus Hospital in the Facility at CuraGen. Total RNA from other tissues was obtained from Clinomics.

[0628] Joint tissues including synovial fluid, synovium, bone and cartilage were obtained from patients undergoing total knee or hip replacement surgery at the Backus Hospital. Tissue samples were immediately snap frozen in liquid nitrogen to ensure that isolated RNA was of optimal quality and not degraded. Additional samples of osteoarthritis and rheumatoid arthritis joint tissues were obtained from Clinomics. Normal control tissues were supplied by Clinomics and were obtained during autopsy of trauma victims.

[0629] Surgical specimens of psoriatic tissues and adjacent matched tissues were provided as total RNA by Clinomics. Two male and two female patients were selected between the ages of 25 and 47. None of the patients were taking prescription drugs at the time samples were isolated.

[0630] Surgical specimens of diseased colon from patients with ulcerative colitis and Crohns disease and adjacent matched tissues were obtained from Clinomics. Bowel tissue from three female and three male Crohn's patients between the ages of 41-69 were used. Two patients were not on prescription medication while the others were taking dexamethasone, phenobarbital, or tylenol. Ulcerative colitis tissue was from three male and four female patients. Four of the patients were taking lebvid and two were on phenobarbital.

[0631] Total RNA from post mortem lung tissue from trauma victims with no disease or with emphysema, asthma or COPD was purchased from Clinomics. Emphysema patients ranged in age from 40-70 and all were smokers, this age range was chosen to focus on patients with cigarette-linked emphysema and to avoid those patients with alpha-1 anti-trypsin deficiencies. Asthma patients ranged in age from 36-75, and excluded smokers to prevent those patients that could also have COPD. COPD patients ranged in age from 3 5-80 and included both smokers and non-smokers. Most patients were taking corticosteroids, and bronchodilators.

[0632] In the labels employed to identify tissues in the AI_comprehensive panel_v1.0 panel, the following abbreviations are used:

[0633] AI=Autoimmunity

[0634] Syn=Synovial

[0635] Normal=No apparent disease

[0636] Rep22 /Rep20=individual patients

[0637] RA=Rheumatoid arthritis

[0638] Backus=From Backus Hospital

[0639] OA=Osteoarthritis

[0640] (SS) (BA) (MF)=Individual patients

[0641] Adj=Adjacent tissue

[0642] Match control=adjacent tissues

[0643] -M=Male

[0644] -F=Female

[0645] COPD=Chronic obstructive pulmonary disease

[0646] AI.05 Chondrosarcoma

[0647] The AI.05 chondrosarcoma plates are comprised of SW1353 cells that had been subjected to serum starvation and treatment with cytokines that are known to induce MMP (1, 3 and 13) synthesis (eg. IL1beta). These treatments include: IL-1beta (10 ng/ml), IL-1beta+TNF-alpha (50 ng/ml), IL-1beta+Oncostatin (50 ng/ml) and PMA (100 ng/ml). The SW1353 cells were obtained from the ATCC (American Type Culture Collection) and were all cultured under standard recommended conditions. The SW1353 cells were plated at 3×10⁵ cells/ml (in DMEM medium—10% FBS) in 6-well plates. The treatment was done in triplicate, for 6 and 18 h. The supernatants were collected for analysis of MMP 1, 3 and 13 production and for RNA extraction. RNA was prepared from these samples using the standard procedures.

[0648] Panels 5D and 5I

[0649] The plates for Panel 5D and 5I include two control wells and a variety of cDNAs isolated from human tissues and cell lines with an emphasis on metabolic diseases. Metabolic tissues were obtained from patients enrolled in the Gestational Diabetes study. Cells were obtained during different stages in the differentiation of adipocytes from human mesenchymal stem cells. Human pancreatic islets were also obtained.

[0650] In the Gestational Diabetes study subjects are young (18-40 years), otherwise healthy women with and without gestational diabetes undergoing routine (elective) Caesarean section. After delivery of the infant, when the surgical incisions were being repaired/closed, the obstetrician removed a small sample (<1 cc) of the exposed metabolic tissues during the closure of each surgical level. The biopsy material was rinsed in sterile saline, blotted and fast frozen within 5 minutes from the time of removal. The tissue was then flash frozen in liquid nitrogen and stored, individually, in sterile screw-top tubes and kept on dry ice for shipment to or to be picked up by CuraGen. The metabolic tissues of interest include uterine wall (smooth muscle), visceral adipose, skeletal muscle (rectus) and subcutaneous adipose. Patient descriptions are as follows:

| | |
|---|---|
| Patient 2 | Diabetic Hispanic, overweight, not on insulin |
| Patient 7-9 | Nondiabetic Caucasian and obese (BMI > 30) |
| Patient 10 | Diabetic Hispanic, overweight, on insulin |
| Patient 11 | Nondiabetic African American and overweight |
| Patient 12 | Diabetic Hispanic on insulin |

[0651] Adipocyte differentiation was induced in donor progenitor cells obtained from Osirus (a division of Clonetics/BioWhittaker) in triplicate, except for Donor 3U which had only two replicates. Scientists at Clonetics isolated, grew and differentiated human mesenchymal stern cells (HuMSCs) for CuraGen based on the published protocol found in Mark F. Pittenger, et al., Multilineage Potential of Adult Human Mesenchymal Stem Cells Science Apr. 2, 1999: 143-147. Clonetics provided Trizol lysates or frozen pellets suitable for mRNA isolation and ds cDNA production. A general description of each donor is as follows:

[0652] Donor 2 and 3 U: Mesenchymal Stem cells, Undifferentiated Adipose

[0653] Donor 2 and 3 AM: Adipose, AdiposeMidway Differentiated

[0654] Donor 2 and 3 AD: Adipose, Adipose Differentiated

[0655] Human cell lines were generally obtained from ATCC (American Type Culture Collection), NCI or the German tumor cell bank and fall into the following tissue groups: kidney proximal convoluted tubule, uterine smooth muscle cells, small intestine, liver HepG2 cancer cells, heart primary stromal cells, and adrenal cortical adenoma cells. These cells are all cultured under standard recommended conditions and RNA extracted using the standard procedures. All samples were processed at CuraGen to produce single stranded cDNA.

[0656] Panel 5I contains all samples previously described with the addition of pancreatic islets from a 58 year old female patient obtained from the Diabetes Research Institute at the University of Miami School of Medicine. Islet tissue was processed to total RNA at an outside source and delivered to CuraGen for addition to panel 5I.

[0657] In the labels employed to identify tissues in the 5D and 5I panels, the following abbreviations are used:

[0658] GO Adipose=Greater Omentum Adipose

[0659] SK=Skeletal Muscle

[0660] UT=Uterus

[0661] PL=Placenta

[0662] AD=Adipose Differentiated

[0663] AM=Adipose Midway Differentiated

[0664] U=Undifferentiated Stem Cells

[0665] Panel CNSD.01

[0666] The plates for Panel CNSD.01 include two control wells and 94 test samples comprised of cDNA isolated from postmortem human brain tissue obtained from the Harvard Brain Tissue Resource Center. Brains are removed from calvaria of donors between 4 and 24 hours after death, sectioned by neuroanatomists, and frozen at −80° C. in liquid nitrogen vapor. All brains are sectioned and examined by neuropathologists to confirm diagnoses with clear associated neuropathology.

[0667] Disease diagnoses are taken from patient records. The panel contains two brains from each of the following diagnoses: Alzheimer's disease, Parkinson's disease, Huntington's disease, Progressive Supernuclear Palsy, Depression, and “Normal controls”. Within each of these brains, the following regions are represented: cingulate gyrus, temporal pole, globus palladus, substantia nigra, Brodman Area 4 (primary motor strip), Brodman Area 7 (parietal cortex), Brodman Area 9 (prefrontal cortex), and Brodman area 17 (occipital cortex). Not all brain regions are represented in all cases; e.g., Huntington's disease is characterized in part by neurodegeneration in the globus palladus, thus this region is impossible to obtain from confirmed Huntington's cases. Likewise Parkinson's disease is characterized by degeneration of the substantia nigra making this region more difficult to obtain. Normal control brains were examined for neuropathology and found to be free of any pathology consistent with neurodegeneration.

[0668] In the labels employed to identify tissues in the CNS panel, the following abbreviations are used:

[0669] PSP=Progressive supranuclear palsy

[0670] Sub Nigra=Substantia nigra

[0671] Glob Palladus=Globus palladus

[0672] Temp Pole=Temporal pole

[0673] Cing Gyr=Cingulate gyrus

[0674] BA 4=Brodman Area 4

[0675] Panel CNS_Neurodegeneration_V1.0

[0676] The plates for Panel CNS_Neurodegeneration_V1.0 include two control wells and 47 test samples comprised of cDNA isolated from postmortem human brain tissue obtained from the Harvard Brain Tissue Resource Center (McLean Hospital) and the Human Brain and Spinal Fluid Resource Center (VA Greater Los Angeles Healthcare System). Brains are removed from calvaria of donors between 4 and 24 hours after death, sectioned by neuroanatomists, and frozen at −80° C. in liquid nitrogen vapor. All brains are sectioned and examined by neuropathologists to confirm diagnoses with clear associated neuropathology.

[0677] Disease diagnoses are taken from patient records. The panel contains six brains from Alzheimer's disease (AD) patients, and eight brains from “Normal controls” who showed no evidence of dementia prior to death. The eight normal control brains are divided into two categories: Controls with no dementia and no Alzheimer's like pathology (Controls) and controls with no dementia but evidence of severe Alzheimer's like pathology, (specifically senile plaque load rated as level 3 on a scale of 0-3; 0=no evidence of plaques, 3=severe AD senile plaque load). Within each of these brains, the following regions are represented: hippocampus, temporal cortex (Brodman Area 21), parietal cortex (Brodman area 7), and occipital cortex (Brodman area 17). These regions were chosen to encompass all levels of neurodegeneration in AD. The hippocampus is a region of early and severe neuronal loss in AD; the temporal cortex is known to show neurodegeneration in AD after the hippocampus; the parietal cortex shows moderate neuronal death in the late stages of the disease; the occipital cortex is spared in AD and therefore acts as a “control” region within AD patients. Not all brain regions are represented in all cases.

[0678] In the labels employed to identify tissues in the CNS_Neurodegeneration_V1.0 panel, the following abbreviations are used:

[0679] AD=Alzheimer's disease brain; patient was demented and showed AD-like pathology upon autopsy

[0680] Control=Control brains; patient not demented, showing no neuropathology

[0681] Control (Path)=Control brains; pateint not demented but showing sever AD-like pathology

[0682] SupTemporal Ctx=Superior Temporal Cortex

[0683] Inf Temporal Ctx=Inferior Temporal Cortex

[0684] A. CG103322-02: CD82 ANTIGEN.

[0685] Expression of gene CG103322-02 was assessed using the primer-probe set Ag6858, described in Table AA. Results of the RTQ-PCR runs are shown in Table AB. Please note that CG103322-02 represents a full-length physical clone.

TABLE AA
Probe Name Ag6858

| | | | Start | SEQ ID |
|---|---|---|---|---|
| Primers | Sequences | Length | Position | No |
| Forward | 5′-agaggacaacagcctttctgtg-3′ | 22 | 550 | 283 |
| Probe | TET-5′-caacaggacccagagtggcaaccac-3′-TAMRA | 25 | 598 | 284 |
| Reverse | 5′-ccaggagctcctggtacaca-3′ | 20 | 637 | 285 |

[0686] TABLE AB
General_screening_panel_v1.6

| | Rel. Exp. (%) |
|---|---|
| | Ag6858, Run |
| Tissue Name | 278387506 |
| Adipose | 1.0 |
| Melanoma* Hs688(A).T | 1.6 |
| Melanoma* Hs688(B).T | 0.6 |
| Melanoma* M14 | 7.0 |
| Melanoma* LOXIMVI | 27.5 |
| Melanoma* SK-MEL-5 | 2.5 |
| Squamous cell carcinoma SCC-4 | 60.3 |
| Testis Pool | 2.1 |
| Prostate ca.* (bone met) PC-3 | 1.7 |
| Prostate Pool | 3.6 |
| Placenta | 2.8 |
| Uterus Pool | 1.9 |
| Ovarian ca. OVCAR-3 | 27.0 |
| Ovarian ca. SK-OV-3 | 2.1 |
| Ovarian ca. OVCAR-4 | 1.7 |
| Ovarian ca. OVCAR-5 | 49.3 |
| Ovarian ca. IGROV-1 | 2.9 |
| Ovarian ca. OVCAR-8 | 5.6 |
| Ovary | 3.0 |
| Breast ca. MCF-7 | 0.0 |
| Breast ca. MDA-MB-231 | 44.8 |
| Breast ca. BT 549 | 7.4 |
| Breast ca. T47D | 48.0 |
| Breast ca. MDA-N | 0.3 |
| Breast Pool | 2.9 |
| Trachea | 9.5 |
| Lung | 1.7 |
| Fetal Lung | 5.9 |
| Lung ca. NCI-N417 | 0.1 |
| Lung ca. LX-1 | 11.0 |
| Lung ca. NCI-H146 | 6.9 |
| Lung ca. SHP-77 | 0.0 |
| Lung ca. A549 | 2.7 |
| Lung ca. NCI-H526 | 0.0 |
| Lung ca. NCI-H23 | 0.4 |
| Lung ca. NCI-H460 | 0.0 |
| Lung ca. HOP-62 | 3.4 |
| Lung ca. NCI-H522 | 0.2 |
| Liver | 0.0 |
| Fetal Liver | 9.6 |
| Liver ca. HepG2 | 0.0 |
| Kidney Pool | 1.5 |
| Fetal Kidney | 0.9 |
| Renal ca. 786-0 | 3.7 |
| Renal ca. A498 | 20.0 |
| Renal ca. ACHN | 0.8 |
| Renal ca. UO-31 | 100.0 |
| Renal ca. TK-10 | 1.5 |
| Bladder | 10.2 |
| Gastric ca. (liver met.) NCI-N87 | 44.8 |
| Gastric ca. KATO III | 20.3 |
| Colon ca. SW-948 | 9.0 |
| Colon ca. SW480 | 20.6 |
| Colon ca.* (SW480 met) SW620 | 8.2 |
| Colon ca. HT29 | 18.4 |
| Colon ca. HCT-116 | 13.4 |
| Colon ca. CaCo-2 | 4.9 |
| Colon cancer tissue | 23.0 |
| Colon ca. SW1116 | 4.0 |
| Colon ca. Colo-205 | 5.6 |
| Colon ca. SW-48 | 25.3 |
| Colon Pool | 1.6 |
| Small Intestine Pool | 3.7 |
| Stomach Pool | 1.4 |
| Bone Marrow Pool | 2.0 |
| Fetal Heart | 0.0 |
| Heart Pool | 1.1 |
| Lymph Node Pool | 0.0 |
| Fetal Skeletal Muscle | 2.1 |
| Skeletal Muscle Pool | 2.3 |
| Spleen Pool | 4.5 |
| Thymus Pool | 5.9 |
| CNS cancer (glio/astro) U87-MG | 55.1 |
| CNS cancer (glio/astro) U-118-MG | 23.5 |
| CNS cancer (neuro; met) SK-N-AS | 1.5 |
| CNS cancer (astro) SF-539 | 5.3 |
| CNS cancer (astro) SNB-75 | 11.9 |
| CNS cancer (glio) SNB-19 | 3.3 |
| CNS cancer (glio) SF-295 | 21.3 |
| Brain (Amygdala) Pool | 6.6 |
| Brain (cerebellum) | 5.1 |
| Brain (fetal) | 3.6 |
| Brain (Hippocampus) Pool | 5.8 |
| Cerebral Cortex Pool | 6.4 |
| Brain (Substantia nigra) Pool | 5.6 |
| Brain (Thalamus) Pool | 7.4 |
| Brain (whole) | 2.5 |
| Spinal Cord Pool | 8.4 |
| Adrenal Gland | 2.5 |
| Pituitary gland Pool | 1.4 |
| Salivary Gland | 6.0 |
| Thyroid (female) | 3.0 |
| Pancreatic ca. CAPAN2 | 0.9 |
| Pancreas Pool | 7.3 |

[0687] General_screening_panel_v1.6 Summary: Ag6858

[0688] The gene is expressed at low levels in most of the cancer cell lines on this panel with the highest expression in a renal cancer cell line UO-31 (CT=30.03). It may be used as a marker for expression.

[0689] CG103322-02 is a deletion splice variant of CD82/KAI1, a gene which was first described in the literature as a metastasis suppressor for prostate cancer (Dong, J.-T.; Lamb, P. W.; Rinker-Schaeffer, C. W.; Vukanovic, J.; Ichikawa, T.; Isaacs, J. T.; Barrett, J. C. KAI1, a metastasis suppressor gene for prostate cancer on human chromosome 11p 11.2. Science 268: 884-886, 1995.)

[0690] B. CG151575-02: Novel Multi-Pass Membrane Protein.

[0691] Expression of gene CGI51575-02 was assessed using the primer-probe set Ag7621, described in Table BA. Results of the RTQ-PCR runs are shown in Table BB.

TABLE BA
Probe Name Ag7621

| | | | Start | SEQ ID |
|---|---|---|---|---|
| Primers | Sequences | Length | Position | No |
| Forward | 5′-cccagagtatctcaagggactt-3′ | 22 | 219 | 286 |
| Probe | TET-5′-aagctgtctctgctgatagactccttcc-3′-TAMRA | 28 | 257 | 287 |
| Reverse | 5′-gtgagatcctgctgtgttgg-3′ | 20 | 304 | 288 |

[0692] TABLE BB
Panel 4.1D

| | Rel. Exp. (%) |
|---|---|
| | Ag7621, Run |
| Tissue Name | 311288444 |
| Secondary Th1 act | 5.9 |
| Secondary Th2 act | 33.7 |
| Secondary Tr1 act | 9.5 |
| Secondary Th1 rest | 0.0 |
| Secondary Th2 rest | 0.0 |
| Secondary Tr1 rest | 9.3 |
| Primary Th1 act | 0.0 |
| Primary Th2 act | 4.5 |
| Primary Tr1 act | 0.0 |
| Primary Th1 rest | 4.9 |
| Primary Th2 rest | 0.0 |
| Primary Tr1 rest | 0.0 |
| CD45RA CD4 lymphocyte act | 31.0 |
| CD45RO CD4 lymphocyte act | 12.3 |
| CD8 lymphocyte act | 0.0 |
| Secondary CD8 lymphocyte rest | 5.5 |
| Secondary CD8 lymphocyte act | 7.1 |
| CD4 lymphocyte none | 0.0 |
| 2ry Th1/Th2/Tr1_anti-CD95 CH11 | 0.0 |
| LAK cells rest | 4.5 |
| LAK cells IL-2 | 14.4 |
| LAK cells IL-2 + IL-12 | 0.0 |
| LAK cells IL-2 + IFN gamma | 0.0 |
| LAK cells IL-2 + IL-18 | 8.1 |
| LAK cells PMA/ionomycin | 6.7 |
| NK Cells IL-2 rest | 18.7 |
| Two Way MLR 3 day | 12.5 |
| Two Way MLR 5 day | 0.0 |
| Two Way MLR 7 day | 0.0 |
| PBMC rest | 4.2 |
| PBMC PWM | 0.0 |
| PBMC PHA-L | 0.0 |
| Ramos (B cell) none | 4.4 |
| Ramos (B cell) ionomycin | 7.3 |
| B lymphocytes PWM | 4.3 |
| B lymphocytes CD40L and IL-4 | 15.2 |
| EOL-1 dbcAMP | 0.0 |
| EOL-1 dbcAMP PMA/ionomycin | 0.0 |
| Dendritic cells none | 22.5 |
| Dendritic cells LPS | 2.9 |
| Dendritic cells anti-CD40 | 0.0 |
| Monocytes rest | 24.0 |
| Monocytes LPS | 41.2 |
| Macrophages rest | 15.2 |
| Macrophages LPS | 14.7 |
| HUVEC none | 5.6 |
| HUVEC starved | 12.4 |
| HUVEC IL-1beta | 4.1 |
| HUVEC IFN gamma | 4.9 |
| HUVEC TNF alpha + IFN gamma | 3.4 |
| HUVEC TNF alpha + IL4 | 0.0 |
| HUVEC IL-11 | 13.3 |
| Lung Microvascular EC none | 27.7 |
| Lung Microvascular EC TNFalpha + IL-1beta | 8.5 |
| Microvascular Dermal EC none | 25.2 |
| Microsvasular Dermal EC TNFalpha + IL-1beta | 0.0 |
| Bronchial epithelium TNFalpha + IL1beta | 43.5 |
| Small airway epithelium none | 23.3 |
| Small airway epithelium TNFalpha + IL-1beta | 71.7 |
| Coronery artery SMC rest | 0.0 |
| Coronery artery SMC TNFalpha + IL-1beta | 0.0 |
| Astrocytes rest | 14.8 |
| Astrocytes TNFalpha + IL-1beta | 19.5 |
| KU-812 (Basophil) rest | 18.3 |
| KU-812 (Basophil) PMA/ionomycin | 8.8 |
| CCD1106 (Keratinocytes) none | 56.6 |
| CCD1106 (Keratinocytes) TNFalpha + IL-1beta | 15.2 |
| Liver cirrhosis | 3.5 |
| NCI-H292 none | 15.5 |
| NCI-H292 IL-4 | 7.0 |
| NCI-H292 IL-9 | 31.4 |
| NCI-H292 IL-13 | 7.5 |
| NCI-H292 IFN gamma | 100.0 |
| HPAEC none | 5.7 |
| HPAEC TNF alpha + IL-1 beta | 17.8 |
| Lung fibroblast none | 16.7 |
| Lung fibroblast TNF alpha + IL-1 beta | 15.6 |
| Lung fibroblast IL-4 | 5.9 |
| Lung fibroblast IL-9 | 42.9 |
| Lung fibroblast IL-13 | 0.0 |
| Lung fibroblast IFN gamma | 17.0 |
| Dermal fibroblast CCD1070 rest | 24.8 |
| Dermal fibroblast CCD1070 TNF alpha | 58.2 |
| Dermal fibroblast CCD1070 IL-1 beta | 11.3 |
| Dermal fibroblast IFN gamma | 10.0 |
| Dermal fibroblast IL-4 | 61.1 |
| Dermal Fibroblasts rest | 21.5 |
| Neutrophils TNFa + LPS | 0.0 |
| Neutrophils rest | 0.0 |
| Colon | 0.0 |
| Lung | 17.1 |
| Thymus | 10.7 |
| Kidney | 23.8 |

[0693] CNS_neurodegeneration_v1.0 Summary: Ag7621 Expression of this gene is low/undetectable (CTs>35) across all of the samples on this panel.

[0694] Panel 4.1D Summary:

[0695] Ag7621 Low expression of this gene is detected mainly in IFN gamma treated NCI-H292 (CT=34.6). NCI-H292 cell line is a human airway epithelial cell line that produces mucins. Expression of this gene is higher in IFN gamma stimulated NCI-H292 compared to resting cells. Thus, this gene may be important in the proliferation or activation of airway epithelium. Mucus overproduction is an important feature of bronchial asthma and chronic obstructive pulmonary disease samples. Therefore, therapeutics designed with the protein encoded by the gene may reduce or eliminate symptoms caused by inflammation in lung epithelia in chronic obstructive pulmonary disease, asthma, allergy, and emphysema.

[0696] C. CG153011-01: Sushi Domain-Containing Membrane Protein.

[0697] Expression of gene CG153011-01 was assessed using the primer-probe set Ag6966, described in Table CA. Results of the RTQ-PCR runs are shown in Table CB. Please note that CG153011-01 represents a full-length physical clone.

TABLE CA

Probe Name Ag6966

| | | | | |
|---|---|---|---|---|
| | | | Start | SEQ ID |
| Primers | Sequences | Length | Position | No |

| | | | | |
|---|---|---|---|---|
| Forward | 5′-cagcgcagagaaatctcac-3′ | 19 | 170 | 289 |
| Probe | TET-5′-tcccaatcccgaggaaaaccagagaagtagct-3′-TAMRA | 32 | 213 | 290 |
| Reverse | 5′-agagtaatgtggcaccgtctc-3′ | 21 | 249 | 291 |

[0698] TABLE CB
General_screening_panel_v1.6

| | Rel. Exp. (%) |
|---|---|
| | Ag6966, Run |
| Tissue Name | 278388950 |
| Adipose | 0.7 |
| Melanoma* Hs688(A).T | 0.0 |
| Melanoma* Hs688(B).T | 0.0 |
| Melanoma* M14 | 0.0 |
| Melanoma* LOXIMVI | 0.0 |
| Melanoma* SK-MEL-5 | 0.2 |
| Squamous cell carcinoma SCC-4 | 0.0 |
| Testis Pool | 8.4 |
| Prostate ca.* (bone met) PC-3 | 0.0 |
| Prostate Pool | 9.1 |
| Placenta | 0.0 |
| Uterus Pool | 2.5 |
| Ovarian ca. OVCAR-3 | 52.9 |
| Ovarian ca. SK-OV-3 | 33.2 |
| Ovarian ca. OVCAR-4 | 9.9 |
| Ovarian ca. OVCAR-5 | 2.8 |
| Ovarian ca. IGROV-1 | 2.6 |
| Ovarian ca. OVCAR-8 | 12.1 |
| Ovary | 18.7 |
| Breast ca. MCF-7 | 47.0 |
| Breast ca. MDA-MB-231 | 0.0 |
| Breast ca. BT 549 | 17.9 |
| Breast ca. T47D | 2.1 |
| Breast ca. MDA-N | 0.0 |
| Breast Pool | 0.6 |
| Trachea | 13.9 |
| Lung | 7.1 |
| Fetal Lung | 23.8 |
| Lung ca. NCI-N417 | 24.1 |
| Lung ca. LX-1 | 0.0 |
| Lung ca. NCI-H146 | 0.0 |
| Lung ca. SHP-77 | 8.8 |
| Lung ca. A549 | 2.2 |
| Lung ca. NCI-H526 | 4.1 |
| Lung ca. NCI-H23 | 0.6 |
| Lung ca. NCI-H460 | 0.0 |
| Lung ca. HOP-62 | 0.0 |
| Lung ca. NCI-H522 | 1.7 |
| Liver | 0.0 |
| Fetal Liver | 0.4 |
| Liver ca. HepG2 | 0.0 |
| Kidney Pool | 2.0 |
| Fetal Kidney | 9.3 |
| Renal ca. 786-0 | 100.0 |
| Renal ca. A498 | 3.6 |
| Renal ca. ACHN | 4.3 |
| Renal ca. UO-31 | 0.0 |
| Renal ca. TK-10 | 17.4 |
| Bladder | 25.5 |
| Gastric ca. (liver met.) NCI-N87 | 68.3 |
| Gastric ca. KATO III | 0.0 |
| Colon ca. SW-948 | 0.0 |
| Colon ca. SW480 | 24.5 |
| Colon ca.* (SW480 met) SW620 | 0.0 |
| Colon ca. HT29 | 0.0 |
| Colon ca. HCT-116 | 1.3 |
| Colon ca. CaCo-2 | 62.0 |
| Colon cancer tissue | 0.8 |
| Colon ca. SW1116 | 0.0 |
| Colon ca. Colo-205 | 0.0 |
| Colon ca. SW-48 | 0.0 |
| Colon Pool | 0.9 |
| Small Intestine Pool | 1.2 |
| Stomach Pool | 2.9 |
| Bone Marrow Pool | 3.8 |
| Fetal Heart | 10.2 |
| Heart Pool | 1.3 |
| Lymph Node Pool | 0.7 |
| Fetal Skeletal Muscle | 1.3 |
| Skeletal Muscle Pool | 0.0 |
| Spleen Pool | 0.0 |
| Thymus Pool | 4.2 |
| CNS cancer (glio/astro) U87-MG | 0.0 |
| CNS cancer (glio/astro) U-118-MG | 0.0 |
| CNS cancer (neuro; met) SK-N-AS | 0.0 |
| CNS cancer (astro) SF-539 | 1.1 |
| CNS cancer (astro) SNB-75 | 17.6 |
| CNS cancer (glio) SNB-19 | 2.5 |
| CNS cancer (glio) SF-295 | 17.8 |
| Brain (Amygdala) Pool | 7.3 |
| Brain (cerebellum) | 35.6 |
| Brain (fetal) | 8.8 |
| Brain (Hippocampus) Pool | 14.5 |
| Cerebral Cortex Pool | 18.2 |
| Brain (Substantia nigra) Pool | 15.0 |
| Brain (Thalamus) Pool | 16.7 |
| Brain (whole) | 8.6 |
| Spinal Cord Pool | 9.1 |
| Adrenal Gland | 2.3 |
| Pituitary gland Pool | 4.3 |
| Salivary Gland | 9.5 |
| Thyroid (female) | 1.4 |
| Pancreatic ca. CAPAN2 | 0.0 |
| Pancreas Pool | 1.7 |

[0699] General_screening_panel_v1.6 Summary:

[0700] Ag6966 Highest expression of this gene is detected in a renal cancer 786-0 cell line (CT=30.8). Moderate levels of expression of this gene is also seen in cluster of cancer cell lines derived from gastric, colon, lung, renal, breast, ovarian, and brain cancers. Thus, expression of this gene could be used as a marker to detect the presence of these cancers. Furthermore, therapeutic modulation of the expression or function of this gene may be effective in the treatment of gastric, colon, lung, renal, breast, ovarian, and brain cancers.

[0701] In addition, this gene is expressed at moderate to low levels in all regions of the central nervous system examined, including amygdala, hippocampus, substantia nigra, thalamus, cerebellum, cerebral cortex, and spinal cord. Therefore, therapeutic modulation of this gene product may be useful in the treatment of central nervous system disorders such as Alzheimer's disease, Parkinson's disease, epilepsy, multiple sclerosis, schizophrenia and depression.

[0702] D. CG153179-01: Membrane Protein.

[0703] Expression of gene CG153179-01 was assessed using the primer-probe set Ag6863, described in Table DA. Results of the RTQ-PCR runs are shown in Table DB. Please note that CG153179-01 represents a full-length physical clone.

TABLE DA

Probe Name Ag6863

| | | | Start | SEQ ID |
|---|---|---|---|---|
| Primers | Sequences | Length | Position | No |
| Forward | 5′-acgtgcaggtttgttacata-3′ | 20 | 609 | 292 |
| Probe | TET-5′-tgtgctacacccattaactcgtcatttaac-3′-TAMRA | 30 | 650 | 293 |
| Reverse | 5′-accttggcagggctaat-3′ | 17 | 680 | 294 |

[0704] TABLE DB
General_screening_panel_v1.6

| | Rel. Exp. (%) |
|---|---|
| | Ag6863, Run |
| Tissue Name | 278700326 |
| Adipose | 0.0 |
| Melanoma* Hs688(A).T | 0.0 |
| Melanoma* Hs688(B).T | 0.0 |
| Melanoma* M14 | 0.0 |
| Melanoma* LOXIMVI | 0.0 |
| Melanoma* SK-MEL-5 | 0.0 |
| Squamous cell carcinoma SCC-4 | 0.0 |
| Testis Pool | 0.0 |
| Prostate ca.* (bone met) PC-3 | 0.0 |
| Prostate Pool | 0.0 |
| Placenta | 0.0 |
| Uterus Pool | 0.0 |
| Ovarian ca. OVCAR-3 | 0.0 |
| Ovarian ca. SK-OV-3 | 0.0 |
| Ovarian ca. OVCAR-4 | 0.0 |
| Ovarian ca. OVCAR-5 | 0.0 |
| Ovarian ca. IGROV-1 | 0.0 |
| Ovarian ca. OVCAR-8 | 0.0 |
| Ovary | 0.0 |
| Breast ca. MCF-7 | 0.0 |
| Breast ca. MDA-MB-231 | 0.0 |
| Breast ca. BT 549 | 0.0 |
| Breast ca. T47D | 0.0 |
| Breast ca. MDA-N | 0.0 |
| Breast Pool | 0.0 |
| Trachea | 0.0 |
| Lung | 0.0 |
| Fetal Lung | 0.0 |
| Lung ca. NCI-N417 | 0.0 |
| Lung ca. LX-1 | 0.0 |
| Lung ca. NCI-H146 | 0.0 |
| Lung ca. SHP-77 | 0.0 |
| Lung ca. A549 | 0.0 |
| Lung ca. NCI-H526 | 0.0 |
| Lung ca. NCI-H23 | 0.0 |
| Lung ca. NCI-H460 | 0.0 |
| Lung ca. HOP-62 | 0.0 |
| Lung ca. NCI-H522 | 0.0 |
| Liver | 0.0 |
| Fetal Liver | 0.0 |
| Liver ca. HepG2 | 0.0 |
| Kidney Pool | 0.0 |
| Fetal Kidney | 0.0 |
| Renal ca. 786-0 | 0.0 |
| Renal ca. A498 | 0.0 |
| Renal ca. ACHN | 0.0 |
| Renal ca. UO-31 | 0.0 |
| Renal ca. TK-10 | 0.0 |
| Bladder | 0.0 |
| Gastric ca. (liver met.) NCI-N87 | 0.0 |
| Gastric ca. KATO III | 0.0 |
| Colon ca. SW-948 | 0.0 |
| Colon ca. SW480 | 0.0 |
| Colon ca.* (SW480 met) SW620 | 0.0 |
| Colon ca. HT29 | 0.0 |
| Colon ca. HCT-116 | 0.0 |
| Colon ca. CaCo-2 | 0.0 |
| Colon cancer tissue | 0.0 |
| Colon ca. SW1116 | 0.0 |
| Colon ca. Colo-205 | 0.0 |
| Colon ca. SW-48 | 0.0 |
| Colon Pool | 0.0 |
| Small Intestine Pool | 0.0 |
| Stomach Pool | 0.0 |
| Bone Marrow Pool | 0.0 |
| Fetal Heart | 5.8 |
| Heart Pool | 17.3 |
| Lymph Node Pool | 0.0 |
| Fetal Skeletal Muscle | 100.0 |
| Skeletal Muscle Pool | 0.0 |
| Spleen Pool | 0.0 |
| Thymus Pool | 0.0 |
| CNS cancer (glio/astro) U87-MG | 0.0 |
| CNS cancer (glio/astro) U-118-MG | 0.0 |
| CNS cancer (neuro; met) SK-N-AS | 0.0 |
| CNS cancer (astro) SF-539 | 0.0 |
| CNS cancer (astro) SNB-75 | 0.0 |
| CNS cancer (glio) SNB-19 | 0.0 |
| CNS cancer (glio) SF-295 | 0.0 |
| Brain (Amygdala) Pool | 0.0 |
| Brain (cerebellum) | 0.0 |
| Brain (fetal) | 0.0 |
| Brain (Hippocampus) Pool | 0.0 |
| Cerebral Cortex Pool | 0.0 |
| Brain (Substantia nigra) Pool | 0.0 |
| Brain (Thalamus) Pool | 0.0 |
| Brain (whole) | 0.0 |
| Spinal Cord Pool | 0.0 |
| Adrenal Gland | 0.0 |
| Pituitary gland Pool | 0.0 |
| Salivary Gland | 0.0 |
| Thyroid (female) | 0.0 |
| Pancreatic ca. CAPAN2 | 0.0 |
| Pancreas Pool | 0.0 |

[0705] General_screening_panel_v1.6 Summary:

[0706] Ag6863 Expression is limited to a sample derived from fetal skeletal muscle (CT=34.7). Interestingly, this gene is expressed at much higher levels in fetal (CT=34.7) when compared to adult skeletal muscle (CT=40). This observation suggests that expression of this gene can be used to distinguish fetal from adult skeletal muscle and other samples in this panel. In addition, the relative overexpression of this gene in fetal skeletal muscle suggests that the protein product may enhance muscular growth or development in the fetus and thus may also act in a regenerative capacity in the adult. Therefore, therapeutic modulation of the protein encoded by this gene could be useful in treatment of muscle related diseases. More specifically, treatment of weak or dystrophic muscle with the protein encoded by this gene could restore muscle mass or function.

[0707] E. CG153403-02: Dickkopf Related Protein-4 Precursor.

[0708] Expression of gene CG153403-02 was assessed using the primer-probe set Ag7176, described in Table EA. Please note that CG153403-01 represents a full-length physical clone.

TABLE EA

Probe Name Ag7176

| | | | Start | SEQ ID |
|---|---|---|---|---|
| Primers | Sequences | Length | Position | No |
| Forward | 5′-ctctgtgtgaacggacaagag-3′ | 21 | 316 | 295 |
| Probe | TET-5′-ccctggactttgctgtgctcgtc-3′-TAMRA | 23 | 369 | 296 |
| Reverse | 5′-ggactggcttacaaattttcgt-3′ | 22 | 400 | 297 |

[0709] CNS_neurodegeneration_v1.0 Summary:

[0710] Ag7176 Expression of this gene is low/undetectable in all samples on this panel (CTs>35).

[0711] Panel 4.1D Summary:

[0712] Ag7176 Expression of this gene is low/undetectable in all samples on this panel (CTs>35).

[0713] F. CG157760-02: PLAC1.

[0714] Expression of gene CG157760-02 was assessed using the primer-probe set Ag7153, described in Table FA. Please note that CG157760-02 represents a full-length physical clone.

TABLE FA

Probe Name Ag7153

| | | | Start | SEQ ID |
|---|---|---|---|---|
| Primers | Sequences | Length | Position | No |
| Forward | 5′-catcagggccagcaaga-3′ | 17 | 342 | 298 |
| Probe | TET-5′-acacctcgtagcatttctcatccttctgg-3′-TAMRA | 29 | 372 | 299 |
| Reverse | 5′-aggtggacaatcgcagttg-3′ | 19 | 429 | 300 |

[0715] CNS_neurodegeneration_v1.0 Summary:

[0716] Ag7153 Expression of this gene is low/undetectable in all samples on this panel (CTs>35).

[0717] Panel 4.1D Summary:

[0718] Ag7153 Expression of this gene is low/undetectable in all samples on this panel (CTs>35).

[0719] G. CG158114-01: splice variant of melanoma associated antigen gp100.

[0720] Expression of gene CG158114-01 was assessed using the primer-probe set Ag5335, described in Table GA. Results of the RTQ-PCR runs are shown in Tables GB and GC.

TABLE GA

Probe Name Ag5335

| | | | Start | SEQ ID |
|---|---|---|---|---|
| Primers | Sequences | Length | Position | No |
| Forward | 5′-gctacaaagggagccaggt-3′ | 20 | 67 | 301 |
| Probe | TET-5′-acayccagtgtatccccaggaaactga-3′-TAMRA | 27 | 96 | 302 |
| Reverse | 5′-cagggaagatgcaggcat-3′ | 18 | 125 | 303 |

[0721] TABLE GB
General_screening_panel_v1.5

| | Rel. Exp. (%) |
|---|---|
| | Ag5335, Run |
| Tissue Name | 237370030 |
| Adipose | 0.0 |
| Melanoma* Hs688(A).T | 0.0 |
| Melanoma* Hs688(B).T | 0.0 |
| Melanoma* M14 | 49.7 |
| Melanoma* LOXIMVI | 1.7 |
| Melanoma* SK-MEL-5 | 100.0 |
| Squamous cell carcinoma SCC-4 | 0.0 |
| Testis Pool | 0.1 |
| Prostate ca.* (bone met) PC-3 | 0.0 |
| Prostate Pool | 0.0 |
| Placenta | 0.0 |
| Uterus Pool | 0.0 |
| Ovarian ca. OVCAR-3 | 0.0 |
| Ovarian ca. SK-OV-3 | 0.0 |
| Ovarian ca. OVCAR-4 | 0.2 |
| Ovarian ca. OVCAR-5 | 0.2 |
| Ovarian ca. IGROV-1 | 0.0 |
| Ovarian ca. OVCAR-8 | 0.1 |
| Ovary | 0.0 |
| Breast ca. MCF-7 | 0.1 |
| Breast ca. MDA-MB-231 | 0.1 |
| Breast ca. BT 549 | 0.0 |
| Breast ca. T47D | 0.1 |
| Breast ca. MDA-N | 0.4 |
| Breast Pool | 0.0 |
| Trachea | 0.0 |
| Lung | 0.0 |
| Fetal Lung | 0.0 |
| Lung ca. NCI-N417 | 0.0 |
| Lung ca. LX-1 | 0.1 |
| Lung ca. NCI-H146 | 0.0 |
| Lung ca. SHP-77 | 0.1 |
| Lung ca. A549 | 0.1 |
| Lung ca. NCI-H526 | 0.0 |
| Lung ca. NCI-H23 | 0.1 |
| Lung ca. NCI-H460 | 0.1 |
| Lung ca. HOP-62 | 0.0 |
| Lung ca. NCI-H522 | 0.1 |
| Liver | 0.0 |
| Fetal Liver | 0.0 |
| Liver ca. HepG2 | 0.0 |
| Kidney Pool | 0.1 |
| Fetal Kidney | 0.0 |
| Renal ca. 786-0 | 0.0 |
| Renal ca. A498 | 0.0 |
| Renal ca. ACHN | 0.1 |
| Renal ca. UO-31 | 0.1 |
| Renal ca. TK-10 | 0.1 |
| Bladder | 0.0 |
| Gastric ca. (liver met.) NCI-N87 | 0.2 |
| Gastric ca. KATO III | 0.0 |
| Colon ca. SW-948 | 0.0 |
| Colon ca. SW480 | 0.2 |
| Colon ca.* (SW480 met) SW620 | 0.0 |
| Colon ca. HT29 | 0.0 |
| Colon ca. HCT-116 | 0.1 |
| Colon ca. CaCo-2 | 0.2 |
| Colon cancer tissue | 0.1 |
| Colon ca. SW1116 | 0.0 |
| Colon ca. Colo-205 | 0.0 |
| Colon ca. SW-48 | 0.1 |
| Colon Pool | 0.0 |
| Small Intestine Pool | 0.0 |
| Stomach Pool | 0.0 |
| Bone Marrow Pool | 0.0 |
| Fetal Heart | 0.0 |
| Heart Pool | 0.0 |
| Lymph Node Pool | 0.1 |
| Fetal Skeletal Muscle | 0.0 |
| Skeletal Muscle Pool | 0.0 |
| Spleen Pool | 0.0 |
| Thymus Pool | 0.1 |
| CNS cancer (glio/astro) U87-MG | 0.0 |
| CNS cancer (glio/astro) U-118-MG | 0.1 |
| CNS cancer (neuro; met) SK-N-AS | 0.1 |
| CNS cancer (astro) SF-539 | 0.0 |
| CNS cancer (astro) SNB-75 | 0.1 |
| CNS cancer (glio) SNB-19 | 0.0 |
| CNS cancer (glio) SF-295 | 0.1 |
| Brain (Amygdala) Pool | 0.0 |
| Brain (cerebellum) | 0.0 |
| Brain (fetal) | 0.0 |
| Brain (Hippocampus) Pool | 0.0 |
| Cerebral Cortex Pool | 0.0 |
| Brain (Substantia nigra) Pool | 0.0 |
| Brain (Thalamus) Pool | 0.0 |
| Brain (whole) | 0.0 |
| Spinal Cord Pool | 0.1 |
| Adrenal Gland | 0.0 |
| Pituitary gland Pool | 0.0 |
| Salivary Gland | 0.0 |
| Thyroid (female) | 0.0 |
| Pancreatic ca. CAPAN2 | 0.1 |
| Pancreas Pool | 0.1 |

[0722] TABLE GC
Panel 4.1D

| | Rel. Exp. (%) |
|---|---|
| | Ag5335, Run |
| Tissue Name | 237371375 |
| Secondary Th1 act | 23.3 |
| Secondary Th2 act | 17.7 |
| Secondary Tr1 act | 5.0 |
| Secondary Th1 rest | 0.0 |
| Secondary Th2 rest | 4.4 |
| Secondary Tr1 rest | 0.0 |
| Primary Th1 act | 0.0 |
| Primary Th2 act | 42.3 |
| Primary Tr1 act | 97.3 |
| Primary Th1 rest | 9.2 |
| Primary Th2 rest | 16.7 |
| Primary Tr1 rest | 6.3 |
| CD45RA CD4 lymphocyte act | 31.9 |
| CD45RO CD4 lymphocyte act | 71.7 |
| CD8 lymphocyte act | 7.9 |
| Secondary CD8 lymphocyte rest | 74.7 |
| Secondary CD8 lymphocyte act | 0.0 |
| CD4 lymphocyte none | 4.6 |
| 2ry Th1/Th2/Tr1_anti-CD95 CH11 | 7.5 |
| LAK cells rest | 21.2 |
| LAK cells IL-2 | 21.0 |
| LAK cells IL-2 + IL-12 | 3.7 |
| LAK cells IL-2 + IFN gamma | 9.9 |
| LAK cells IL-2 + IL-18 | 8.5 |
| LAK cells PMA/ionomycin | 49.0 |
| NK Cells IL-2 rest | 39.0 |
| Two Way MLR 3 day | 5.5 |
| Two Way MLR 5 day | 5.7 |
| Two Way MLR 7 day | 10.8 |
| PBMC rest | 3.9 |
| PBMC PWM | 0.0 |
| PBMC PHA-L | 8.8 |
| Ramos (B cell) none | 0.0 |
| Ramos (B cell) ionomycin | 26.4 |
| B lymphocytes PWM | 5.1 |
| B lymphocytes CD40L and IL-4 | 29.7 |
| EOL-1 dbcAMP | 0.0 |
| EOL-1 dbcAMP PMA/ionomycin | 0.0 |
| Dendritic cells none | 14.7 |
| Dendritic cells LPS | 0.0 |
| Dendritic cells anti-CD40 | 0.0 |
| Monocytes rest | 0.0 |
| Monocytes LPS | 5.8 |
| Macrophages rest | 0.0 |
| Macrophages LPS | 15.3 |
| HUVEC none | 13.2 |
| HUVEC starved | 10.1 |
| HUVEC IL-1beta | 0.0 |
| HUVEC IFN gamma | 7.9 |
| HUVEC TNF alpha + IFN gamma | 0.0 |
| HUVEC TNF alpha + IL4 | 0.0 |
| HUVEC IL-11 | 0.0 |
| Lung Microvascular EC none | 25.0 |
| Lung Microvascular EC TNFalpha + IL-1beta | 0.0 |
| Microvascular Dermal EC none | 0.0 |
| Microsvasular Dermal EC TNFalpha + IL-1beta | 5.6 |
| Bronchial epithelium TNFalpha + IL1beta | 7.4 |
| Small airway epithelium none | 0.0 |
| Small airway epithelium TNFalpha + IL-1beta | 30.8 |
| Coronery artery SMC rest | 8.9 |
| Coronery artery SMC TNFalpha + IL-1beta | 14.7 |
| Astrocytes rest | 7.6 |
| Astrocytes TNFalpha + IL-1beta | 2.0 |
| KU-812 (Basophil) rest | 0.0 |
| KU-812 (Basophil) PMA/ionomycin | 4.0 |
| CCD1106 (Keratinocytes) none | 26.4 |
| CCD1106 (Keratinocytes) TNFalpha + IL-1beta | 16.7 |
| Liver cirrhosis | 2.2 |
| NCI-H292 none | 52.1 |
| NCI-H292 IL-4 | 58.6 |
| NCI-H292 IL-9 | 100.0 |
| NCI-H292 IL-13 | 63.3 |
| NCI-H292 IFN gamma | 8.9 |
| HPAEC none | 3.6 |
| HPAEC TNF alpha + IL-1 beta | 5.8 |
| Lung fibroblast none | 0.0 |
| Lung fibroblast TNF alpha + IL-1 beta | 4.7 |
| Lung fibroblast IL-4 | 1.9 |
| Lung fibroblast IL-9 | 0.0 |
| Lung fibroblast IL-13 | 0.0 |
| Lung fibroblast IFN gamma | 4.4 |
| Dermal fibroblast CCD1070 rest | 5.3 |
| Dermal fibroblast CCD1070 TNF alpha | 18.0 |
| Dermal fibroblast CCD1070 IL-1 beta | 0.0 |
| Dermal fibroblast IFN gamma | 12.2 |
| Dermal fibroblast IL-4 | 17.4 |
| Dermal Fibroblasts rest | 0.0 |
| Neutrophils TNFa + LPS | 0.0 |
| Neutrophils rest | 5.5 |
| Colon | 0.0 |
| Lung | 0.0 |
| Thymus | 7.3 |
| Kidney | 16.2 |

[0723] CNS_neurodegeneration_v1.0 Summary:

[0724] Ag5335 Expression of this gene is low/undetectable in all samples on this panel (CTs>35).

[0725] General_screening_panel_v1.5 Summary:

[0726] Ag5335 This gene is very highly expressed in two melanoma cancer cell line samples (CTs=22). This novel gene encodes a protein that is homologous to Melanocyte protein Pmel 17 which plays an important role in melanogenesis and is actively investigated as targets for melanoma immunotherapy (Martinez-Esparza M, Pigment Cell Res 2000 April; 13(2): 120-6). Thus, expression of this gene could be used to differentiate between these samples and other samples on this panel and as a marker to detect the presence of melanoma. Furthermore, therapeutic modulation of the expression or function of this gene may be effective in the treatment of melanoma.

[0727] Among tissues with metabolic function, this gene is expressed at low but significant levels in pancreas, and adult and fetal and liver. This expression among these tissues suggests that this gene product may play a role in normal neuroendocrine and metabolic function and that disregulated expression of this gene may contribute to neuroendocrine disorders or metabolic diseases, such as obesity and diabetes.

[0728] Panel 4.1D Summary:

[0729] Ag5335 Highest expression is seen in a sample derived from IL-9 treated NCI-H292 goblet cells (CT=33.5). Low but significant expression is also seen in NCI-H292 cells treated with IL-4, IL-13, or untreated cells, as well as in PMA/ionomycin treated LAK cells, untreated NK cells, primary activated Th1 and Tr2 cells, CD45RO CD4 lymphocytes and resting secondary CD8 lymphocytes. This expression suggests that this gene product may be involved in inflammatory conditions of the lung, including asthma, emphysema, and allergy.

[0730] H. CG158553-01: Erythropoietin Receptor Precursor.

[0731] Expression of gene CG158553-01 was assessed using the primer-probe set Ag5446, described in Table HA.

TABLE HA

Probe Name Ag5446

| | | | Start | SEQ ID |
|---|---|---|---|---|
| Primers | Sequences | Length | Position | No |
| Forward | 5′-tcccagggccatgg-3′ | 14 | 1298 | 304 |
| Probe | TET-5′-ccaccccacctaaagtacctgtacctt-3′-TAMRA | 28 | 1339 | 305 |
| Reverse | 5′-agttgagatgccagagtcagat-3′ | 22 | 1371 | 306 |

[0732] AI_comprehensive panel_v1.0 Summary:

[0733] Ag5446 Expression of this gene is low/undetectable in all samples on this panel (CTs>35).

[0734] General_screening_panel_v1.5 Summary:

[0735] Ag5446 Expression of this gene is low/undetectable in all samples on this panel (CTs>35).

[0736] Panel 4.1D Summary:

[0737] Ag5446 Expression of this gene is low/undetectable in all samples on this panel (CTs>35).

[0738] I. CG158983-01, CG158983-02 and CG158983-03: Chloride Channel.

[0739] Expression of gene CG158983-01, CG158983-02, and CG158983-03 was assessed using the primer-probe sets Ag5892 and Ag6186, described in Tables IA and IB. Results of the RTQ-PCR runs are shown in Tables IC, ID, IE, IF, IG and IH. Please note that CG158983-03 represents a full-length physical clone of the CG158983-02 gene, validating the prediction of the gene sequence.

TABLE IA

Probe Name Ag5892

| | | | Start | SEQ ID |
|---|---|---|---|---|
| Primers | Sequences | Length | Position | No |
| Forward | 5′-agaccaagctccagctgttt-3′ | 20 | 24 | 307 |
| Probe | TET-5′-ctctcccgtcctcactcgcctt-3′-TAMRA | 23 | 47 | 308 |
| Reverse | 5′-aggagcaggaccatgaagag-3′ | 20 | 98 | 309 |

[0740] TABLE IB

Probe Name Ag6186

| | | | | |
|---|---|---|---|---|
| Primers | Sequences | Length | Start Position | SEQ ID No |

| | | | | |
|---|---|---|---|---|
| Forward | 5′-ctgcagatcgaggactttctg-3′ | 21 | 242 | 310 |
| Probe | TET-5′-ccgcccgaggagtccaaca-3′-TAMRA | 19 | 278 | 311 |
| Reverse | 5′-gatgaacgcggagaacttgt-3′ | 20 | 318 | 312 |

[0741] TABLE IC
AI.05 chondrosarcoma

| | Rel. Exp. (%) |
|---|---|
| | Ag5892, Run |
| Tissue Name | 308433431 |
| 138353_PMA (18 hrs) | 0.0 |
| 138352_IL-1beta + Oncostatin M (18 hrs) | 0.0 |
| 138351_IL-1beta + TNFa (18 hrs) | 9.5 |
| 138350_IL-1beta (18 hrs) | 7.8 |
| 138354_Untreated-complete medium (18 hrs) | 12.0 |
| 138347_PMA (6 hrs) | 23.5 |
| 138346_IL-1beta + Oncostatin M (6 hrs) | 31.6 |
| 138345_IL-1beta + TNFa (6 hrs) | 7.6 |
| 138344_IL-1beta (6 hrs) | 26.8 |
| 138348_Untreated-complete medium (6 hrs) | 56.3 |
| 138349_Untreated-serum starved (6 hrs) | 100.0 |

[0742] TABLE ID
AI_comprehensive panel_v1.0

| | Rel. Exp. (%) |
|---|---|
| | Ag5892, Run |
| Tissue Name | 249079679 |
| 110967 COPD-F | 1.1 |
| 110980 COPD-F | 0.8 |
| 110968 COPD-M | 1.5 |
| 110977 COPD-M | 0.7 |
| 110989 Emphysema-F | 1.3 |
| 110992 Emphysema-F | 0.7 |
| 110993 Emphysema-F | 0.3 |
| 110994 Emphysema-F | 0.5 |
| 110995 Emphysema-F | 2.3 |
| 110996 Emphysema-F | 0.5 |
| 110997 Asthma-M | 9.5 |
| 111001 Asthma-F | 0.9 |
| 111002 Asthma-F | 1.4 |
| 111003 Atopic Asthma-F | 2.1 |
| 111004 Atopic Asthma-F | 2.9 |
| 111005 Atopic Asthma-F | 1.4 |
| 111006 Atopic Asthma-F | 0.5 |
| 111417 Allergy-M | 1.1 |
| 112347 Allergy-M | 0.0 |
| 112349 Normal Lung-F | 0.1 |
| 112357 Normal Lung-F | 0.3 |
| 112354 Normal Lung-M | 0.2 |
| 112374 Crohns-F | 0.7 |
| 112389 Match Control Crohns-F | 71.2 |
| 112375 Crohns-F | 1.0 |
| 112732 Match Control Crohns-F | 40.9 |
| 112725 Crohns-M | 0.3 |
| 112387 Match Control Crohns-M | 0.6 |
| 112378 Crohns-M | 0.1 |
| 112390 Match Control Crohns-M | 0.7 |
| 112726 Crohns-M | 3.5 |
| 112731 Match Control Crohns-M | 0.4 |
| 112380 Ulcer Col-F | 0.6 |
| 112734 Match Control Ulcer Col-F | 100.0 |
| 112384 Ulcer Col-F | 1.4 |
| 112737 Match Control Ulcer Col-F | 1.1 |
| 112386 Ulcer Col-F | 1.1 |
| 112738 Match Control Ulcer Col-F | 2.1 |
| 112381 Ulcer Col-M | 0.2 |
| 112735 Match Control Ulcer Col-M | 0.3 |
| 112382 Ulcer Col-M | 35.6 |
| 112394 Match Control Ulcer Col-M | 0.4 |
| 112383 Ulcer Col-M | 1.2 |
| 112736 Match Control Ulcer Col-M | 42.6 |
| 112423 Psoriasis-F | 0.5 |
| 112427 Match Control Psoriasis-F | 0.3 |
| 112418 Psoriasis-M | 0.5 |
| 112723 Match Control Psoriasis-M | 1.1 |
| 112419 Psoriasis-M | 1.2 |
| 112424 Match Control Psoriasis-M | 0.0 |
| 112420 Psoriasis-M | 1.1 |
| 112425 Match Control Psoriasis-M | 0.7 |
| 104689 (MF) OA Bone-Backus | 3.1 |
| 104690 (MF) Adj “Normal” Bone-Backus | 1.4 |
| 104691 (MF) OA Synovium-Backus | 0.7 |
| 104692 (BA) OA Cartilage-Backus | 21.9 |
| 104694 (BA) OA Bone-Backus | 5.2 |
| 104695 (BA) Adj “Normal” Bone-Backus | 1.4 |
| 104696 (BA) OA Synovium-Backus | 0.7 |
| 104700 (SS) OA Bone-Backus | 1.6 |
| 104701 (SS) Adj “Normal” Bone-Backus | 4.2 |
| 104702 (SS) OA Synovium-Backus | 2.1 |
| 117093 OA Cartilage Rep7 | 0.9 |
| 112672 OA Bone5 | 1.0 |
| 112673 OA Synovium5 | 0.4 |
| 112674 OA Synovial Fluid cells5 | 0.3 |
| 117100 OA Cartilage Rep14 | 0.3 |
| 112756 OA Bone9 | 2.0 |
| 112757 OA Synovium9 | 0.2 |
| 112758 OA Synovial Fluid Cells9 | 1.3 |
| 117125 RA Cartilage Rep2 | 1.1 |
| 113492 Bone2 RA | 27.5 |
| 113493 Synovium2 RA | 8.0 |
| 113494 Syn Fluid Cells RA | 18.8 |
| 113499 Cartilage4 RA | 31.6 |
| 113500 Bone4 RA | 37.9 |
| 113501 Synovium4 RA | 25.5 |
| 113502 Syn Fluid Cells4 RA | 17.9 |
| 113495 Cartilage3 RA | 25.9 |
| 113496 Bone3 RA | 27.5 |
| 113497 Synovium3 RA | 16.0 |
| 113498 Syn Fluid Cells3 RA | 30.6 |
| 117106 Normal Cartilage Rep20 | 0.8 |
| 113663 Bone3 Normal | 0.0 |
| 113664 Synovium3 Normal | 0.0 |
| 113665 Syn Fluid Cells3 Normal | 0.0 |
| 117107 Normal Cartilage Rep22 | 0.2 |
| 113667 Bone4 Normal | 0.0 |
| 113668 Synovium4 Normal | 0.2 |
| 113669 Syn Fluid Cells4 Normal | 0.4 |

[0743] TABLE IE
General_screening_panel_v1.5

| | Rel. Exp. (%) |
|---|---|
| | Ag5892, Run |
| Tissue Name | 247291076 |
| Adipose | 0.8 |
| Melanoma* Hs688(A).T | 24.8 |
| Melanoma* Hs688(B).T | 20.0 |
| Melanoma* M14 | 0.0 |
| Melanoma* LOXIMVI | 0.2 |
| Melanoma* SK-MEL-5 | 0.0 |
| Squamous cell carcinoma SCC-4 | 1.1 |
| Testis Pool | 1.1 |
| Prostate ca.* (bone met) PC-3 | 3.0 |
| Prostate Pool | 0.6 |
| Placenta | 95.3 |
| Uterus Pool | 1.6 |
| Ovarian ca OVCAR-3 | 0.8 |
| Ovarian ca. SK-OV-3 | 15.4 |
| Ovarian ca. OVCAR-4 | 11.0 |
| Ovarian ca. OVCAR-5 | 30.4 |
| Ovarian ca. IGROV-1 | 0.8 |
| Ovarian ca. OVCAR-8 | 11.7 |
| Ovary | 0.8 |
| Breast ca. MCF-7 | 2.9 |
| Breast ca. MDA-MB-231 | 48.6 |
| Breast ca. BT 549 | 0.1 |
| Breast ca. T47D | 44.4 |
| Breast ca. MDA-N | 0.0 |
| Breast Pool | 0.1 |
| Trachea | 1.1 |
| Lung | 0.0 |
| Fetal Lung | 20.7 |
| Lung ca. NCI-N417 | 0.0 |
| Lung ca LX-1 | 1.9 |
| Lung ca. NCI-H146 | 0.0 |
| Lung ca. SHP-77 | 0.1 |
| Lung ca. A549 | 0.3 |
| Lung ca. NCI-H526 | 0.0 |
| Lung ca NCI-H23 | 0.3 |
| Lung ca. NCI-H460 | 0.0 |
| Lung ca. HOP-62 | 1.3 |
| Lung ca. NCI-H522 | 0.5 |
| Liver | 0.0 |
| Fetal Liver | 0.1 |
| Liver ca. HepG2 | 1.0 |
| Kidney Pool | 0.3 |
| Fetal Kidney | 0.1 |
| Renal ca. 786-0 | 3.3 |
| Renal ca. A498 | 0.0 |
| Renal ca. ACHN | 0.3 |
| Renal ca. UO-31 | 0.6 |
| Renal ca. TK-10 | 1.3 |
| Bladder | 0.4 |
| Gastric ca. (liver met.) NCI-N87 | 100.0 |
| Gastric ca. KATO III | 1.1 |
| Colon ca. SW-948 | 1.9 |
| Colon ca. SW480 | 3.8 |
| Colon ca.* (SW480 met) SW620 | 0.8 |
| Colon ca. HT29 | 8.7 |
| Colon ca. HCT-116 | 1.6 |
| Colon ca. CaCo-2 | 4.4 |
| Colon cancer tissue | 1.5 |
| Colon ca. SW1116 | 1.2 |
| Colon ca. Colo-205 | 0.1 |
| Colon ca. SW-48 | 0.0 |
| Colon Pool | 0.3 |
| Small Intestine Pool | 0.1 |
| Stomach Pool | 0.1 |
| Bone Marrow Pool | 1.3 |
| Fetal Heart | 0.1 |
| Heart Pool | 0.2 |
| Lymph Node Pool | 0.2 |
| Fetal Skeletal Muscle | 0.1 |
| Skeletal Muscle Pool | 0.3 |
| Spleen Pool | 0.6 |
| Thymus Pool | 1.0 |
| CNS cancer (glio/astro) U87-MG | 0.1 |
| CNS cancer (glio/astro) U-118-MG | 0.1 |
| CNS cancer (neuro; met) SK-N-AS | 0.1 |
| CNS cancer (astro) SF-539 | 0.3 |
| CNS cancer (astro) SNB-75 | 5.1 |
| CNS cancer (glio) SNB-19 | 1.2 |
| CNS cancer (glio) SF-295 | 0.0 |
| Brain (Amygdala) Pool | 0.0 |
| Brain (cerebellum) | 0.1 |
| Brain (fetal) | 0.1 |
| Brain (Hippocampus) Pool | 0.1 |
| Cerebral Cortex Pool | 0.1 |
| Brain (Substantia nigra) Pool | 0.1 |
| Brain (Thalamus) Pool | 0.0 |
| Brain (whole) | 0.1 |
| Spinal Cord Pool | 0.3 |
| Adrenal Gland | 0.1 |
| Pituitary gland Pool | 0.1 |
| Salivary Gland | 0.5 |
| Thyroid (female) | 67.4 |
| Pancreatic ca. CAPAN2 | 6.0 |
| Pancreas Pool | 0.1 |

[0744] TABLE IF
Panel 4.1D

| | Rel. Exp. (%) |
|---|---|
| | Ag5892, Run |
| Tissue Name | 247290537 |
| Secondary Th1 act | 0.3 |
| Secondary Th2 act | 0.0 |
| Secondary Tr1 act | 0.0 |
| Secondary Th1 rest | 0.2 |
| Secondary Th2 rest | 0.2 |
| Secondary Tr1 rest | 0.0 |
| Primary Th1 act | 0.0 |
| Primary Th2 act | 0.0 |
| Primary Tr1 act | 0.0 |
| Primary Th1 rest | 0.3 |
| Primary Th2 rest | 2.4 |
| Primary Tr1 rest | 0.0 |
| CD45RA CD4 lymphocyte act | 0.2 |
| CD45RO CD4 lymphocyte act | 2.2 |
| CD8 lymphocyte act | 0.2 |
| Secondary CD8 lymphocyte rest | 0.6 |
| Secondary CD8 lymphocyte act | 0.0 |
| CD4 lymphocyte none | 0.2 |
| 2ry Th1/Th2/Tr1_anti-CD95 CH11 | 0.8 |
| LAK cells rest | 2.3 |
| LAK cells IL-2 | 11.2 |
| LAK cells IL-2 + IL-12 | 3.6 |
| LAK cells IL-2 + IFN gamma | 3.2 |
| LAK cells IL-2 + IL-18 | 1.5 |
| LAK cells PMA/ionomycin | 2.3 |
| NK Cells IL-2 rest | 31.0 |
| Two Way MLR 3 day | 2.5 |
| Two Way MLR 5 day | 0.2 |
| Two Way MLR 7 day | 1.2 |
| PBMC rest | 2.3 |
| PBMC PWM | 1.1 |
| PBMC PHA-L | 0.5 |
| Ramos (B cell) none | 0.0 |
| Ramos (B cell) ionomycin | 0.0 |
| B lymphocytes PWM | 0.2 |
| B lymphocytes CD40L and IL-4 | 0.5 |
| EOL-1 dbcAMP | 0.0 |
| EOL-1 dbcAMP PMA/ionomycin | 0.0 |
| Dendritic cells none | 0.5 |
| Dendritic cells LPS | 0.5 |
| Dendritic cells anti-CD40 | 0.0 |
| Monocytes rest | 0.0 |
| Monocytes LPS | 2.2 |
| Macrophages rest | 0.2 |
| Macrophages LPS | 0.5 |
| HUVEC none | 0.0 |
| HUVEC starved | 1.2 |
| HUVEC IL-1beta | 0.9 |
| HUVEC. IFN gamma | 0.0 |
| HUVEC TNF alpha + IFN gamma | 0.0 |
| HUVEC TNF alpha + IL4 | 0.0 |
| HUVEC IL-11 | 0.0 |
| Lung Microvascular EC none | 7.0 |
| Lung Microvascular EC TNFalpha + IL-1beta | 0.5 |
| Microvascular Dermal EC none | 0.0 |
| Microsvasular Dermal EC TNFalpha + IL-1beta | 1.0 |
| Bronchial epithelium TNFalpha + IL1beta | 8.2 |
| Small airway epithelium none | 100.0 |
| Small airway epithelium TNFalpha + IL-1beta | 77.9 |
| Coronery artery SMC rest | 2.1 |
| Coronery artery SMC TNFalpha + IL-1beta | 0.8 |
| Astrocytes rest | 0.6 |
| Astrocytes TNFalpha + IL-1beta | 2.2 |
| KU-812 (Basophil) rest | 0.5 |
| KU-812 (Basophil) PMA/ionomycin | 0.0 |
| CCD1106 (Keratinocytes) none | 8.8 |
| CCD1106 (Keratinocytes) TNFalpha + IL-1beta | 7.1 |
| Liver cirrhosis | 0.0 |
| NCI-H292 none | 10.7 |
| NCI-H292 IL-4 | 6.3 |
| NCI-H292 IL-9 | 10.4 |
| NCI-H292 IL-13 | 4.2 |
| NCI-H292 IFN gamma | 4.6 |
| HPAEC none | 0.0 |
| HPAEC TNF alpha + IL-1 beta | 0.2 |
| Lung fibroblast none | 1.9 |
| Lung fibroblast TNF alpha + IL-1 beta | 0.9 |
| Lung fibroblast IL-4 | 2.4 |
| Lung fibroblast IL-9 | 7.8 |
| Lung fibroblast IL-13 | 0.0 |
| Lung fibroblast IFN gamma | 4.8 |
| Dermal fibroblast CCD1070 rest | 6.4 |
| Dermal fibroblast CCD1070 TNF alpha | 4.3 |
| Dermal fibroblast CCD1070 IL-1 beta | 2.3 |
| Dermal fibroblast IFN gamma | 2.9 |
| Dermal fibroblast IL-4 | 1.1 |
| Dermal Fibroblasts rest | 1.2 |
| Neutrophils TNFa + LPS | 0.0 |
| Neutrophils rest | 0.0 |
| Colon | 0.0 |
| Lung | 4.5 |
| Thymus | 0.1 |
| Kidney | 0.2 |

[0745] TABLE IG
Panel 5 Islet

| | Rel. Exp. (%) |
|---|---|
| | Ag5892, Run |
| Tissue Name | 253578281 |
| 97457_Patient-02go_adipose | 3.2 |
| 97476_Patient-07sk_skeletal muscle | 0.3 |
| 97477_Patient-07ut_uterus | 0.1 |
| 97478_Patient-07pl_placenta | 40.1 |
| 99167_Bayer Patient 1 | 0.6 |
| 97482_Patient-08ut_uterus | 0.2 |
| 97483_Patient-08pl_placenta | 47.3 |
| 97486_Patient-09sk_skeletal muscle | 0.0 |
| 97487_Patient-09ut_uterus | 0.1 |
| 97488_Patient-09pl_placenta | 33.2 |
| 97492_Patient-10ut_uterus | 0.0 |
| 97493_Patient-10pl_placenta | 62.4 |
| 97495_Patient-11go_adipose | 4.1 |
| 97496_Patient-11sk_skeletal muscle | 0.2 |
| 97497_Patient-11ut_uterus | 0.4 |
| 97498_Patient-11pl_placenta | 47.6 |
| 97500_Patient-12go_adipose | 3.3 |
| 97501_Patient-12sk_skeletal muscle | 0.0 |
| 97502_Patient-12ut_uterus | 0.6 |
| 97503_Patient-12pl_placenta | 100.0 |
| 94721_Donor 2 U - A_Mesenchymal Stem Cells | 0.9 |
| 94722_Donor 2 U - B_Mesenchymal Stem Cells | 2.0 |
| 94723_Donor 2 U - C_Mesenchymal Stem Cells | 1.9 |
| 94709_Donor 2 AM - A_adipose | 0.3 |
| 94710_Donor 2 AM - B_adipose | 0.9 |
| 94711_Donor 2 AM - C_adipose | 0.5 |
| 94712_Donor 2 AD - A_adipose | 0.6 |
| 94713_Donor 2 AD - B_adipose | 0.7 |
| 94714_Donor 2 AD - C_adipose | 0.6 |
| 94742_Donor 3 U - A_Mesenchymal Stem Cells | 2.3 |
| 94743_Donor 3 U - B_Mesenchymal Stem Cells | 9.5 |
| 94730_Donor 3 AM - A_adipose | 2.7 |
| 94731_Donor 3 AM - B_adipose | 1.8 |
| 94732_Donor 3 AM - C_adipose | 1.2 |
| 94733_Donor 3 AD - A_adipose | 6.3 |
| 94734_Donor 3 AD - B_adipose | 1.6 |
| 94735_Donor 3 AD - C_adipose | 11.9 |
| 77138_Liver_HepG2untreated | 2.3 |
| 73556_Heart_Cardiac stromal cells (primary) | 0.1 |
| 81735_Small Intestine | 0.4 |
| 72409_Kidney_Proximal Convoluted Tubule | 0.0 |
| 82685_Small intestine_Duodenum | 0.0 |
| 90650_Adrenal_Adrenocortical adenoma | 0.0 |
| 72410_Kidney_HRCE | 3.7 |
| 72411_Kidney_HRE | 0.8 |
| 73139_Uterus_Uterine smooth muscle cells | 0.7 |

[0746] TABLE IH
general oncology screening panel_v_2.4

| | Rel. Exp. (%) |
|---|---|
| | Ag5892, Run |
| Tissue Name | 260316169 |
| Colon cancer 1 | 3.7 |
| Colon NAT 1 | 2.5 |
| Colon cancer 2 | 25.7 |
| Colon NAT 2 | 4.6 |
| Colon cancer 3 | 19.2 |
| Colon NAT 3 | 13.9 |
| Colon malignant cancer 4 | 12.5 |
| Colon NAT 4 | 2.1 |
| Lung cancer 1 | 29.7 |
| Lung NAT 1 | 18.9 |
| Lung cancer 2 | 36.6 |
| Lung NAT 2 | 17.0 |
| Squamous cell carcinoma 3 | 62.0 |
| Lung NAT 3 | 10.1 |
| Metastatic melanoma 1 | 2.7 |
| Melanoma 2 | 13.9 |
| Melanoma 3 | 42.9 |
| Metastatic melanoma 4 | 14.2 |
| Metastatic melanoma 5 | 8.8 |
| Bladder cancer 1 | 0.0 |
| Bladder NAT 1 | 0.0 |
| Bladder cancer 2 | 3.5 |
| Bladder NAT 2 | 0.0 |
| Bladder NAT 3 | 1.1 |
| Bladder NAT 4 | 2.3 |
| Prostate adenocarcinoma 1 | 4.8 |
| Prostate adenocarcinoma 2 | 0.8 |
| Prostate adenocarcinoma 3 | 5.1 |
| Prostate adenocarcinoma 4 | 100.0 |
| Prostate NAT 5 | 2.8 |
| Prostate adenocarcinoma 6 | 4.4 |
| Prostate adenocarcinoma 7 | 4.1 |
| Prostate adenocarcinoma 8 | 2.6 |
| Prostate adenocarcinoma 9 | 5.8 |
| Prostate NAT 10 | 2.2 |
| Kidney cancer 1 | 3.9 |
| Kidney NAT 1 | 1.8 |
| Kidney cancer 2 | 20.4 |
| Kidney NAT 2 | 2.4 |
| Kidney cancer 3 | 2.6 |
| Kidney NAT 3 | 0.2 |
| Kidney cancer 4 | 1.5 |
| Kidney NAT 4 | 6.6 |

[0747] AI.05 Chondrosarcoma Summary:

[0748] Ag5892 Highest expression of this gene is detected in untreated serum starved chondrosarcoma cell line (SW1353) (CT=32.2). Interestingly, expression of this gene appears to be slightly down regulated upon treatment with IL-1 (CTs=334-35), a potent activator of pro-inflammatory cytokines and matrix metalloproteinases that participate in the destruction of cartilage observed in osteoarthritis (OA). Modulation of the expression of this transcript in chondrocytes may therefore be important for preventing the degeneration of cartilage observed in OA.

[0749] AI_Comprehensive Panel_v1.0 Summary:

[0750] Ag5892 Highest expression is seen in a sample derived from normal tissue adjacent to ulcerative colitis (CT=27.7). In addition, prominent levels of expression are seen in a cluster of samples derived from rheumatoid arthritis, as well as in an OA sample. Thus, expression of this gene could be used to differentiate these samples from other samples and as a marker of these diseases. Furthermore, therapeutic modulation of the expression or function of this gene may be useful in the treatment of these diseases. Ag5892 Results from a second experiment with this probe and primer, run 247842321, are not included. The amp plot indicates that there were experimental difficulties with this run. Ag6186 Expression of this gene is low/undetectable in all samples on this panel (CTs>35).

[0751] General_screening_panel_v1.5 Summary:

[0752] Ag5892 Highest expression is seen in a gastric cancer cell line (CT=28). Moderate levels of expression are also seen in a cluster of cell lines derived from breast, ovarian, and melanoma cancers, as well as in normal thyroid, fetal lung and placenta. In addition, this gene is expressed at much higher levels in fetal lung tissue (CT=30) when compared to expression in the adult counterpart (CT=40). Thus, expression of this gene may be used to differentiate between the fetal and adult source of this tissue.

[0753] Panel 4.1D Summary:

[0754] Ag5892 Prominent expression of this gene is seen in untreated small airway epithelium, as well as in small airway epithelium treated with TNF-a and IL-1 b (CTs=28-29). In addition, low but significant levels of expression are seen in clusters of samples derived from lung and dermal fibroblasts, as well as in NCI-H292 goblet cells. Thus, expression of this gene could be used as as a marker of small airway epithelium. Furthermore, modulation of the expression or function of this gene may be useful in the treatment of inflammatory conditions of the lung, including allergy, emphysema, and asthma. Ag6186 Expression of this gene is low/undetectable in all samples on this panel (CTs>35).

[0755] Panel 5 Islet Summary:

[0756] Ag5892 Expression of this gene is prominent in placenta, consistent with expression in Panel 1.5 (CTs=28-30). Thus, expression of this gene could be used as a marker of this tissue.

[0757] General Oncology Screening Panel_V_{—}2.4 Summary:

[0758] Ag5892 Highest expression of this gene is seen in a prostate cancer (CT=30). Moderate levels of expression of this gene are seen in colon, lung, kidney, melanoma, and skin cell carcinoma cancers. Thus, expression of this gene may be useful of a marker of these or other cancers, particularly hormone dependent cancers like breast cancers. In addition, modulation of the expression or function of this gene may be useful in the treatment of cancers.

[0759] J. CG159015-01, CG159015-02, and CG159015-03: Novel Secreted Protein.

[0760] Expression of gene CG159015-01, CG159015-02, and CG159015-03 was assessed using the primer-probe set Ag5962, described in Table JA. Results of the RTQ-PCR runs are shown in Tables JB and JC. Please note that CG159015-03 represents a full-length physical clone.

TABLE JA

Probe Name Ag5962

| | | | | |
|---|---|---|---|---|
| Primers | Sequences | Length | Start Position | SEQ ID No |

| | | | | |
|---|---|---|---|---|
| Forward | 5′-aaagatgaaactgcggt-3′ | 17 | 338 | 313 |
| Probe | TET-5-tccacgaggaggcaagcaa-3′-TAMRA | 19 | 357 | 314 |
| Reverse | 5′-agctgttgctctgact-3′ | 16 | 390 | 315 |

[0761] TABLE JB
General_screening_panel_v1.5

| | Rel. Exp. (%) |
|---|---|
| | Ag5962, Run |
| Tissue Name | 248162755 |
| Adipose | 1.6 |
| Melanoma* Hs688(A).T | 21.5 |
| Melanoma* Hs688(B).T | 20.2 |
| Melanoma* M14 | 14.5 |
| Melanoma* LOXIMVI | 10.7 |
| Melanoma* SK-MEL-5 | 14.1 |
| Squamous cell carcinoma SCC-4 | 2.6 |
| Testis Pool | 4.2 |
| Prostate ca.* (bone met) PC-3 | 7.3 |
| Prostate Pool | 4.4 |
| Placenta | 2.3 |
| Uterus Pool | 1.3 |
| Ovarian ca. OVCAR-3 | 10.0 |
| Ovarian ca. SK-OV-3 | 30.1 |
| Ovarian ca. OVCAR-4 | 9.0 |
| Ovarian ca. OVCAR-5 | 17.8 |
| Ovarian ca. IGROV-1 | 26.8 |
| Ovarian ca. OVCAR-8 | 16.8 |
| Ovary | 5.2 |
| Breast ca. MCF-7 | 10.7 |
| Breast ca. MDA-MB-231 | 29.3 |
| Breast ca. BT 549 | 34.9 |
| Breast ca. T47D | 2.9 |
| Breast ca. MDA-N | 3.6 |
| Breast Pool | 11.7 |
| Trachea | 4.9 |
| Lung | 3.3 |
| Fetal Lung | 5.6 |
| Lung ca. NCI-N417 | 1.6 |
| Lung ca. LX-1 | 9.7 |
| Lung ca. NCI-H146 | 3.7 |
| Lung ca. SHP-77 | 3.1 |
| Lung ca. A549 | 9.9 |
| Lung ca. NCI-H526 | 3.8 |
| Lung ca. NCI-H23 | 12.8 |
| Lung ca. NCI-H460 | 6.5 |
| Lung ca. HOP-62 | 6.7 |
| Lung ca. NCI-H522 | 8.8 |
| Liver | 1.0 |
| Fetal Liver | 2.6 |
| Liver ca. HepG2 | 8.2 |
| Kidney Pool | 22.7 |
| Fetal Kidney | 2.8 |
| Renal ca. 786-0 | 7.7 |
| Renal ca. A498 | 10.5 |
| Renal ca. ACHN | 6.0 |
| Renal ca. UO-31 | 5.8 |
| Renal ca. TK-10 | 6.5 |
| Bladder | 5.5 |
| Gastric ca. (liver met.) NCI-N87 | 6.6 |
| Gastric ca. KATO III | 6.7 |
| Colon ca. SW-948 | 6.6 |
| Colon ca. SW480 | 12.7 |
| Colon ca.* (SW480 met) SW620 | 8.4 |
| Colon ca. HT29 | 9.3 |
| Colon ca. HCT-116 | 12.8 |
| Colon ca. CaCo-2 | 6.5 |
| Colon cancer tissue | 10.8 |
| Colon ca. SW1116 | 3.4 |
| Colon ca. Colo-205 | 2.0 |
| Colon ca. SW-48 | 1.6 |
| Colon Pool | 13.4 |
| Small Intestine Pool | 6.3 |
| Stomach Pool | 6.9 |
| Bone Marrow Pool | 1.7 |
| Fetal Heart | 3.1 |
| Heart Pool | 12.7 |
| Lymph Node Pool | 15.9 |
| Fetal Skeletal Muscle | 2.8 |
| Skeletal Muscle Pool | 25.5 |
| Spleen Pool | 6.5 |
| Thymus Pool | 9.0 |
| CNS cancer (glio/astro) U87-MG | 49.7 |
| CNS cancer (glio/astro) U-118-MG | 27.0 |
| CNS cancer (neuro; met) SK-N-AS | 7.5 |
| CNS cancer (astro) SF-539 | 7.9 |
| CNS cancer (astro) SNB-75 | 100.0 |
| CNS cancer (glio) SNB-19 | 25.9 |
| CNS cancer (glio) SF-295 | 26.8 |
| Brain (Amygdala) Pool | 5.8 |
| Brain (cerebellum) | 26.6 |
| Brain (fetal) | 6.5 |
| Brain (Hippocampus) Pool | 5.3 |
| Cerebral Cortex Pool | 6.1 |
| Brain (Substantia nigra) Pool | 6.7 |
| Brain (Thalamus) Pool | 6.7 |
| Brain (whole) | 3.3 |
| Spinal Cord Pool | 5.8 |
| Adrenal Gland | 5.8 |
| Pituitary gland Pool | 3.2 |
| Salivary Gland | 2.9 |
| Thyroid (female) | 4.7 |
| Pancreatic ca. CAPAN2 | 3.1 |
| Pancreas Pool | 13.6 |

[0762] TABLE JC
Panel 5 Islet

| | Rel. Exp. (%) |
|---|---|
| | Ag5962, Run |
| Tissue Name | 248195280 |
| 97457_Patient-02go adipose | 20.2 |
| 97476_Patient-07sk_skeletal muscle | 15.9 |
| 97477_Patient-07ut_uterus | 20.2 |
| 97478_Patient-07pl_placenta | 8.9 |
| 99167_Bayer Patient 1 | 100.0 |
| 97482_Patient-08ut_uterus | 17.4 |
| 97483_Patient-08pl_placenta | 4.7 |
| 97486_Patient-09sk_skeletal muscle | 10.0 |
| 97487_Patient-09ut_uterus | 49.0 |
| 97488_Patient-09pl_placenta | 4.4 |
| 97492_Patient-10ut_uterus | 32.3 |
| 97493_Patient-10pl_placenta | 7.5 |
| 97495_Patient-11go_adipose | 5.2 |
| 97496_Patient-11sk_skeletal muscle | 12.0 |
| 97497_Patient-11ut_uterus | 34.9 |
| 97498_Patient-11pl_placenta | 3.5 |
| 97500_Patient-12go_adipose | 11.1 |
| 97501_Patient-12sk_skeletal muscle | 25.7 |
| 97502_Patient-12ut_uterus | 46.3 |
| 97503_Patient-12pl_placenta | 3.4 |
| 94721_Donor 2 U - A_Mesenchymal Stem Cells | 15.0 |
| 94722_Donor 2 U - B_Mesenchymal Stem Cells | 8.2 |
| 94723_Donor 2 U - C_Mesenchymal Stem Cells | 12.4 |
| 94709_Donor 2 AM - A_adipose | 21.3 |
| 94710_Donor 2 AM - B_adipose | 14.0 |
| 94711_Donor 2 AM - C_adipose | 9.7 |
| 94712_Donor 2 AD - A_adipose | 20.4 |
| 94713_Donor 2 AD - B_adipose | 18.4 |
| 94714_Donor 2 AD - C_adipose | 21.5 |
| 94742_Donor 3 U - A_Mesenchymal Stem Cells | 5.4 |
| 94743_Donor 3 U - B_Mesenchymal Stem Cells | 10.6 |
| 94730_Donor 3 AM - A_adipose | 31.2 |
| 94731_Donor 3 AM - B_adipose | 11.7 |
| 94732_Donor 3 AM - C_adipose | 8.7 |
| 94733_Donor 3 AD - A_adipose | 22.1 |
| 94734_Donor 3 AD - B_adipose | 4.3 |
| 94735_Donor 3 AD - C_adipose | 13.4 |
| 77138_Liver HepG2untreated | 16.7 |
| 73556_Heart_Cardiac stromal cells (primary) | 5.0 |
| 81735_Small Intestine | 18.7 |
| 72409_Kidney_Proximal Convoluted Tubule | 3.3 |
| 82685_Small intestine_Duodenum | 0.6 |
| 90650_Adrenal_Adrenocortical adenoma | 23.7 |
| 72410_Kidney_HRCE | 23.5 |
| 72411_Kidney_HRE | 14.2 |
| 73139_Uterus_Uterine smooth muscle cells | 10.1 |

[0763] General_screening_panel_v1.5 Summary:

[0764] Ag5962 Highest expression of this gene is detected in brain cancer SNB-75 cell line (CT=25.2). Moderate to high levels of expression of this gene is also seen in cluster of cancer cell lines derived from pancreatic, gastric, colon, lung, liver, renal, breast, ovarian, prostate, squamous cell carcinoma, melanoma and brain cancers. Thus, expression of this gene could be used as a marker to detect the presence of these cancers. Furthermore, therapeutic modulation of the expression or function of this gene may be effective in the treatment of pancreatic, gastric, colon, lung, liver, renal, breast, ovarian, prostate, squamous cell carcinoma, melanoma and brain cancers.

[0765] Among tissues with metabolic or endocrine function, this gene is expressed at moderate levels in pancreas, adipose, adrenal gland, thyroid, pituitary gland, skeletal muscle, heart, liver and the gastrointestinal tract. Therefore, therapeutic modulation of the activity of this gene may prove useful in the treatment of endocrine/metabolically related diseases, such as obesity and diabetes.

[0766] In addition, this gene is expressed at moderate levels in all regions of the central nervous system examined, including amygdala, hippocampus, substantia nigra, thalamus, cerebellum, cerebral cortex, and spinal cord. Therefore, therapeutic modulation of this gene product may be useful in the treatment of central nervous system disorders such as Alzheimer's disease, Parkinson's disease, epilepsy, multiple sclerosis, schizophrenia and depression.

[0767] Panel 5 Islet Summary:

[0768] Ag5962 Highest expression of this gene is detected in islet cells (CT=27.7). This gene shows wide spread expression in this panel, with moderate expressions in adipose, skeletal muscle, uterus, placenta, small intestine, cardiac stromal cells and kidney. Therefore, therapeutic modulation of this gene may be useful in the treatment of endocrine/metabolically related diseases, such as obesity and diabetes, including type II diabetes.

[0769] K. CG50387-03: Connexin 46.

[0770] Expression of gene CG50387-03 was assessed using the primer-probe sets Ag2597, Ag5234 and Ag5235, described in Tables KA, KB and KC. Results of the RTQ-PCR runs are shown in Tables KD and KE.

TABLE KA

Probe Name Ag2597

| | | | Start | SEQ ID |
|---|---|---|---|---|
| Primers | Sequences | Length | Position | No |
| Forward | 5′-ggagctttctgggaaqactct-3′ | 21 | 11 | 316 |
| Probe | TET-5′-tagaaaatgcacaggagcactccacg-3′-TAMRA | 26 | 32 | 317 |
| Reverse | 5′-caaaatgcggaagatgaaca-3′ | 20 | 86 | 318 |

[0771] TABLE KB

Probe Name Ag5234

| | | | Start | SEQ ID |
|---|---|---|---|---|
| Primers | Sequences | Length | Position | No |
| Forward | 5′-cttcatcatcttcatgctggcg-3′ | 22 | 606 | 319 |
| Probe | TET-5′-cactgctgctcaacatgctggagatata-3′-TAMRA | 28 | 641 | 320 |
| Reverse | 5′-ggctggtcacgccctgctt-3′ | 19 | 691 | 321 |

[0772] TABLE KC

Probe Name Ag5235

| | | | Start | SEQ ID |
|---|---|---|---|---|
| Primers | Sequences | Length | Position | No |
| Forward | 5′-gcggacttcaaaatgctagccctgacc-3′ | 27 | 883 | 322 |
| Probe | TET-5′-ccagtccgccaagctctacaacgg-3′-TAMRA | 24 | 927 | 323 |
| Reverse | 5′-gcccagttctgctcagtcatcagc-3′ | 24 | 963 | 324 |

[0773] TABLE KD
General_screening_panel_v1.5

| | Rel. | Rel. |
|---|---|---|
| | Exp. (%) | Exp. (%) |
| | Ag5234, Run | Ag5235, Run |
| Tissue Name | 229514466 | 229514467 |
| Adipose | 0.0 | 0.3 |
| Melanoma* Hs688(A).T | 1.4 | 0.3 |
| Melanoma* Hs688(B).T | 0.8 | 0.0 |
| Melanoma* M14 | 40.1 | 41.2 |
| Melanoma* LOXIMVI | 2.0 | 7.6 |
| Melanoma* SK-MEL-5 | 32.1 | 22.5 |
| Squamous cell carcinoma SCC-4 | 3.4 | 2.3 |
| Testis Pool | 1.6 | 2.7 |
| Prostate ca.* (bone met) PC-3 | 3.5 | 0.0 |
| Prostate Pool | 0.0 | 0.0 |
| Placenta | 1.2 | 0.8 |
| Uterus Pool | 0.3 | 0.0 |
| Ovarian ca. OVCAR-3 | 0.8 | 0.0 |
| Ovarian ca. SK-OV-3 | 52.5 | 57.4 |
| Ovarian ca. OVCAR-4 | 6.5 | 6.4 |
| Ovarian ca. OVCAR-5 | 15.2 | 14.3 |
| Ovarian ca. IGROV-1 | 4.9 | 4.7 |
| Ovarian ca. OVCAR-8 | 12.9 | 10.8 |
| Ovary | 0.0 | 1.2 |
| Breast ca. MCF-7 | 0.0 | 1.5 |
| Breast ca. MDA-MB-231 | 42.9 | 31.6 |
| Breast ca. BT 549 | 0.9 | 0.0 |
| Breast ca. T47D | 1.0 | 0.0 |
| Breast ca. MDA-N | 0.0 | 0.0 |
| Breast Pool | 3.8 | 4.7 |
| Trachea | 0.7 | 0.0 |
| Lung | 0.0 | 0.0 |
| Fetal Lung | 0.0 | 0.9 |
| Lung ca. NCI-N417 | 0.5 | 0.0 |
| Lung ca. LX-1 | 0.6 | 0.0 |
| Lung ca. NCI-H146 | 0.0 | 0.0 |
| Lung ca. SHP-77 | 0.0 | 0.0 |
| Lung ca. A549 | 0.7 | 0.0 |
| Lung ca. NCI-H526 | 0.0 | 0.0 |
| Lung ca. NCI-H23 | 12.7 | 11.8 |
| Lung ca. NCI-H460 | 1.6 | 2.7 |
| Lung ca. HOP-62 | 3.6 | 0.6 |
| Lung ca. NCI-H522 | 16.3 | 10.7 |
| Liver | 0.0 | 0.0 |
| Fetal Liver | 0.7 | 0.0 |
| Liver ca. HepG2 | 0.6 | 0.0 |
| Kidney Pool | 1.5 | 3.5 |
| Fetal Kidney | 6.8 | 6.2 |
| Renal ca. 786-0 | 0.6 | 0.0 |
| Renal ca. A498 | 0.0 | 0.0 |
| Renal ca. ACHN | 0.0 | 0.0 |
| Renal ca. UO-31 | 0.0 | 0.0 |
| Renal ca. TK-10 | 0.0 | 0.0 |
| Bladder | 1.8 | 1.6 |
| Gastric ca. (liver met.) NCI-N87 | 6.3 | 7.5 |
| Gastric ca. KATO III | 0.7 | 0.0 |
| Colon ca. SW-948 | 0.0 | 0.0 |
| Colon ca. SW480 | 100.0 | 100.0 |
| Colon ca.* (SW480 met) SW620 | 0.0 | 0.6 |
| Colon ca. HT29 | 0.0 | 0.0 |
| Colon ca. HCT-116 | 67.8 | 55.1 |
| Colon ca. CaCo-2 | 0.0 | 0.7 |
| Colon cancer tissue | 0.0 | 0.0 |
| Colon ca. SW1116 | 10.9 | 14.9 |
| Colon ca. Colo-205 | 0.0 | 0.0 |
| Colon ca. SW-48 | 0.0 | 0.0 |
| Colon Pool | 3.6 | 3.6 |
| Small Intestine Pool | 2.1 | 5.3 |
| Stomach Pool | 0.8 | 0.7 |
| Bone Marrow Pool | 0.0 | 0.3 |
| Fetal Heart | 61.1 | 45.4 |
| Heart Pool | 5.8 | 7.2 |
| Lymph Node Pool | 0.1 | 0.0 |
| Fetal Skeletal Muscle | 0.4 | 0.9 |
| Skeletal Muscle Pool | 0.0 | 0.0 |
| Spleen Pool | 0.0 | 0.6 |
| Thymus Pool | 0.5 | 0.2 |
| CNS cancer (glio/astro) U87-MG | 0.0 | 0.0 |
| CNS cancer (glio/astro) U-118-MG | 1.3 | 0.0 |
| CNS cancer (neuro; met) SK-N-AS | 0.0 | 0.0 |
| CNS cancer (astro) SF-539 | 0.4 | 0.0 |
| CNS cancer (astro) SNB-75 | 0.5 | 1.1 |
| CNS cancer (glio) SNB-19 | 3.4 | 5.6 |
| CNS cancer (glio) SF-295 | 4.3 | 5.9 |
| Brain (Amygdala) Pool | 0.3 | 0.0 |
| Brain (cerebellum) | 0.0 | 0.7 |
| Brain (fetal) | 0.0 | 0.0 |
| Brain (Hippocampus) Pool | 0.2 | 0.0 |
| Cerebral Cortex Pool | 0.0 | 0.0 |
| Brain (Substantia nigra) Pool | 0.0 | 1.1 |
| Brain (Thalamus) Pool | 0.0 | 0.0 |
| Brain (whole) | 0.0 | 0.0 |
| Spinal Cord Pool | 0.0 | 1.0 |
| Adrenal Gland | 0.0 | 0.0 |
| Pituitary gland Pool | 0.0 | 0.2 |
| Salivary Gland | 0.0 | 0.0 |
| Thyroid (female) | 0.0 | 0.0 |
| Pancreatic ca. CAPAN2 | 26.2 | 22.5 |
| Pancreas Pool | 3.5 | 0.5 |

[0774] TABLE KE
Panel 4.1D

| | Rel. | Rel. |
|---|---|---|
| | Exp. (%) | Exp. (%) |
| | Ag5234, | Ag5235, |
| | Run | Run |
| Tissue Name | 229788208 | 229788230 |
| Secondary Th1 act | 2.6 | 0.0 |
| Secondary Th2 act | 0.0 | 0.0 |
| Secondary Tr1 act | 0.0 | 0.0 |
| Secondary Th1 rest | 0.0 | 0.0 |
| Secondary Th2 rest | 0.0 | 0.0 |
| Secondary Tr1 rest | 0.0 | 0.0 |
| Primary Th1 act | 0.0 | 0.0 |
| Primary Th2 act | 0.0 | 0.0 |
| Primary Tr1 act | 0.0 | 0.0 |
| Primary Th1 rest | 0.0 | 0.0 |
| Primary Th2 rest | 0.0 | 0.0 |
| Primary Tr1 rest | 0.0 | 0.0 |
| CD45RA CD4 lymphocyte act | 0.0 | 0.0 |
| CD45RO CD4 lymphocyte act | 0.0 | 2.7 |
| CD8 lymphocyte act | 0.0 | 0.0 |
| Secondary CD8 lymphocyte rest | 1.6 | 0.0 |
| Secondary CD8 lymphocyte act | 0.0 | 0.0 |
| CD4 lymphocyte none | 1.6 | 0.0 |
| 2ry Th1/Th2/Tr1_anti-CD95 CH11 | 0.0 | 0.0 |
| LAK cells rest | 0.0 | 0.0 |
| LAK cells IL-2 | 0.0 | 2.4 |
| LAK cells IL-2 + IL-12 | 1.1 | 0.0 |
| LAK cells IL-2 + IFN gamma | 0.0 | 0.0 |
| LAK cells IL-2 + IL-18 | 0.0 | 0.0 |
| LAK cells PMA/ionomycin | 2.5 | 2.4 |
| NK Cells IL-2 rest | 0.0 | 0.0 |
| Two Way MLR 3 day | 1.5 | 0.0 |
| Two Way MLR 5 day | 0.0 | 0.0 |
| Two Way MLR 7 day | 0.0 | 0.0 |
| PBMC rest | 0.0 | 0.0 |
| PBMC PWM | 1.2 | 4.5 |
| PBMC PHA-L | 8.4 | 3.0 |
| Ramos (B cell) none | 0.0 | 0.0 |
| Ramos (B cell) ionomycin | 0.0 | 0.0 |
| B lymphocytes PWM | 0.0 | 0.0 |
| B lymphocytes CD40L and IL-4 | 0.0 | 0.0 |
| EOL-1 dbcAMP | 0.0 | 0.0 |
| EOL-1 dbcAMP PMA/ionomycin | 0.0 | 0.0 |
| Dendritic cells none | 0.0 | 0.0 |
| Dendritic cells LPS | 0.0 | 0.0 |
| Dendritic cells anti-CD40 | 0.0 | 0.0 |
| Monocytes rest | 0.0 | 0.0 |
| Monocytes LPS | 100.0 | 100.0 |
| Macrophages rest | 0.0 | 0.0 |
| Macrophages LPS | 0.0 | 0.0 |
| HUVEC none | 0.0 | 0.0 |
| HUVEC starved | 0.0 | 0.0 |
| HUVEC IL-1beta | 0.0 | 0.0 |
| HUVEC IFN gamma | 0.0 | 0.0 |
| HUVEC TNF alpha + IFN gamma | 0.0 | 0.0 |
| HUVEC TNF alpha + IL4 | 0.0 | 0.0 |
| HUVEC IL-11 | 0.0 | 0.0 |
| Lung Microvascular EC none | 0.0 | 0.0 |
| Lung Microvascular EC | 0.0 | 0.0 |
| TNFalpha + IL-1beta | | |
| Microvascular Dermal EC none | 0.0 | 0.0 |
| Microsvasular Dermal EC | 0.0 | 0.0 |
| TNFalpha + IL-1beta | | |
| Bronchial epithelium | 0.0 | 1.7 |
| TNFalpha + IL1beta | | |
| Small airway epithelium none | 0.0 | 0.0 |
| Small airway epithelium | 8.4 | 7.7 |
| TNFalpha + IL-1beta | | |
| Coronery artery SMC rest | 0.0 | 0.0 |
| Coronery artery SMC | 0.0 | 0.0 |
| TNFalpha + IL-1beta | | |
| Astrocytes rest | 4.8 | 3.9 |
| Astrocytes | 6.5 | 0.0 |
| TNFalpha + IL-1beta | | |
| KU-812 (Basophil) rest | 0.0 | 0.0 |
| KU-812 (Basophil) PMA/ionomycin | 0.0 | 0.0 |
| CCD1106 (Keratinocytes) none | 9.2 | 6.8 |
| CCD1106 (Keratinocytes) | 0.0 | 3.3 |
| TNFalpha + IL-1beta | | |
| Liver cirrhosis | 0.0 | 0.0 |
| NCI-H292 none | 0.0 | 0.0 |
| NCI-H292 IL-4 | 0.0 | 0.0 |
| NCI-H292 IL-9 | 0.0 | 2.3 |
| NCI-H292 IL-13 | 2.7 | 4.1 |
| NCI-H292 IFN gamma | 0.0 | 0.0 |
| HPAEC none | 0.0 | 0.0 |
| HPAEC TNF alpha + IL-1 beta | 0.0 | 0.0 |
| Lung fibroblast none | 8.7 | 1.6 |
| Lung fibroblast | 17.0 | 20.3 |
| TNF alpha + IL-1 beta | | |
| Lung fibroblast IL-4 | 2.1 | 0.0 |
| Lung fibroblast IL-9 | 6.1 | 4.0 |
| Lung fibroblast IL-13 | 0.0 | 0.0 |
| Lung fibroblast IFN gamma | 6.3 | 3.2 |
| Dermal fibroblast CCD1070 rest | 0.0 | 0.0 |
| Dermal fibroblast CCD1070 TNF | 3.4 | 0.0 |
| alpha | | |
| Dermal fibroblast | 3.9 | 0.0 |
| CCD1070 IL-1beta | | |
| Dermal fibroblast IFN gamma | 8.6 | 0.0 |
| Dermal fibroblast IL-4 | 3.2 | 7.5 |
| Dermal Fibroblasts rest | 1.8 | 3.3 |
| Neutrophils TNFa + LPS | 0.0 | 0.0 |
| Neutrophils rest | 0.0 | 0.0 |
| Colon | 0.0 | 0.0 |
| Lung | 0.0 | 0.0 |
| Thymus | 0.0 | 0.0 |
| Kidney | 2.4 | 3.6 |

[0775] CNS_neurodegeneration_v1.0 Summary:

[0776] Ag2597/Ag5234/Ag5235 Expression of this gene is low/undetectable in all samples on this panel (CTs>35).

[0777] General_screening_panel_v1.5 Summary:

[0778] Ag5234/Ag5235 Two experiments with two different probe-primer sets are in excellent agreement. Highest expression of this gene is detected in a sample derived from a colon cancer cell line (SW480) (CTs=30). In addition, there is substantial expression associated with two other colon cancer cell lines, a pancreatic cancer cell line, two lung cancer cell lines, a breast cancer cell line, two melanoma cell lines and a cluster of several ovarian cancer cell lines. Thus, the expression of this gene could be used to distinguish the above samples from the other samples in the panel. Moreover, therapeutic modulation of this gene, through the use of small molecule drugs, antibodies or protein therapeutics might be of benefit in the treatment of ovarian, colon, pancreatic, lung, breast cancers or melanoma.

[0779] This gene is also expressed at moderate levels in fetal heart (CT=31.1) and at lower levels in the adult heart (CT=34.5). Thus, expression of this gene may be used to differentiate between fetal and adult heart tissue. Furthermore, the higher levels of expression in fetal heart suggest that the protein encoded by this gene may be important for the pathogenesis, diagnosis, and/or treatment of diseases of the heart.

[0780] Panel 4.1D Summary:

[0781] Ag5234/Ag5235 Two experiments with two different prob-primer sets are in excellent agreement. Highest expression of this gene is detected mainly in monocytes stimulated with LPS (CTs=32). Upon activation with pathogens, including bacterial LPS, monocytes contribute to the innate and specific immunity by migrating to the site of tissue injury and releasing inflammatory cytokines. This release contributes to the inflammation process. This transcript encodes for a connexin like protein, a family of proteins that is involved in gap junction and intercellular communication. Thus, the protein encoded by this transcript may play a role in the interaction of activated monocytes with the endothelium. This is the first step necessary for the migration of these cells to injured tissue. Therefore, modulation of the expression or the function of the protein encoded by this gene, by antibodies or small molecules can prevent the recruitment of monocytes and the inflammatory process, and lead to improvement of the symptoms of patients suffering from autoimmune and inflammatory diseases such as asthma, allergies, inflammatory bowel disease, lupus erythematosus, or rheumatoid arthritis.

[0782] L. CG52113-01, CG52113-03, CG52113-04, CG52113-05, and CG52113-06: Notch 4 Like Protein.

[0783] Expression of gene CG52113-01 was assessed using the primer-probe sets Ag2665 and Ag2778, described in Tables LA and LB. Results of the RTQ-PCR runs are shown in Tables LC, LD, LE and LF. Please note that CG52113-05 represents a full-length physical clone of the CG52113-01 gene, validating the prediction of the gene sequence.

TABLE LA

Probe Name Ag2665

| | | | Start | SEQ ID |
|---|---|---|---|---|
| Primers | Sequences | Length | Position | No |
| Forward | 5′-gtctgcagacggtacactctgt-3′ | 22 | 602 | 325 |
| Probe | TET-5′-cccaacccgacaggagtggacag-3′-TAMRA | 23 | 654 | 326 |
| Reverse | 5′-gcacttgttccttcattgca-3′ | 20 | 677 | 327 |

[0784] TABLE LB

Probe Name Ag2778

| | | | Start | SEQ ID |
|---|---|---|---|---|
| Primers | Sequences | Length | Position | No |
| Forward | 5′-gtctgcagacggtacactctgt-3′ | 22 | 602 | 328 |
| Probe | TET-5′-cccaacccgacaggagtggacag-3′-TAMRA | 23 | 654 | 329 |
| Reverse | 5′-gcacttcttccttcattgca-3′ | 20 | 677 | 330 |

[0785] TABLE LC
CNS_neurodegeneration_v1.0

| | Rel. Exp. (%) | Rel. Exp. (%) | Rel. Exp. (%) | Rel. Exp. (%) |
|---|---|---|---|---|
| | Ag2665, Run | Ag2665, Run | Ag2778, Run | Ag2778, Run |
| Tissue Name | 206955568 | 230512508 | 208699215 | 269216134 |
| AD 1 Hippo | 20.9 | 19.8 | 30.1 | 10.8 |
| AD 2 Hippo | 42.6 | 27.5 | 46.7 | 22.5 |
| AD 3 Hippo | 10.4 | 15.0 | 19.2 | 5.0 |
| AD 4 Hippo | 11.8 | 16.0 | 22.7 | 5.1 |
| AD 5 Hippo | 84.7 | 70.7 | 98.6 | 29.9 |
| AD 6 Hippo | 37.9 | 45.7 | 54.0 | 19.8 |
| Control 2 Hippo | 28.7 | 25.5 | 28.3 | 12.9 |
| Control 4 Hippo | 9.3 | 8.9 | 24.5 | 8.1 |
| Control (Path) 3 Hippo | 16.0 | 9.9 | 17.2 | 6.0 |
| AD 1 Temporal Ctx | 19.3 | 15.8 | 10.7 | 7.2 |
| AD 2 Temporal Ctx | 45.4 | 44.8 | 68.8 | 14.4 |
| AD 3 Temporal Ctx | 14.4 | 13.0 | 10.3 | 5.6 |
| AD 4 Temporal Ctx | 30.8 | 39.5 | 33.0 | 21.2 |
| AD 5 Inf Temporal Ctx | 100.0 | 87.1 | 100.0 | 28.1 |
| AD 5 Sup Temporal Ctx | 42.3 | 40.9 | 70.2 | 21.0 |
| AD 6 Inf Temporal Ctx | 55.5 | 49.7 | 39.5 | 22.4 |
| AD 6 Sup Temporal Ctx | 46.0 | 50.0 | 82.4 | 28.5 |
| Control 1 Temporal Ctx | 23.0 | 17.7 | 25.7 | 9.3 |
| Control 2 Temporal Ctx | 57.0 | 61.6 | 42.3 | 23.8 |
| Control 3 Temporal Ctx | 42.6 | 40.3 | 42.6 | 22.1 |
| Control 3 Temporal Ctx | 39.2 | 27.0 | 26.1 | 8.3 |
| Control (Path) 1 Temporal Ctx | 68.3 | 73.7 | 85.9 | 34.9 |
| Control (Path) 2 Temporal Ctx | 78.5 | 59.9 | 54.7 | 34.9 |
| Control (Path) 3 Temporal Ctx | 23.0 | 21.8 | 19.8 | 9.5 |
| Control (Path) 4 Temporal Ctx | 82.4 | 64.2 | 62.9 | 28.3 |
| AD 1 Occipital Ctx | 10.9 | 20.3 | 19.6 | 9.0 |
| AD 2 Occipital Ctx (Missing) | 0.0 | 0.0 | 2.0 | 0.0 |
| AD 3 Occipital Ctx | 19.6 | 10.5 | 25.7 | 8.1 |
| AD 4 Occipital Ctx | 39.2 | 37.1 | 33.2 | 12.2 |
| AD 5 Occipital Ctx | 43.2 | 39.0 | 48.3 | 8.5 |
| AD 6 Occipital Ctx | 25.5 | 22.8 | 32.8 | 18.8 |
| Control 1 Occipital Ctx | 18.3 | 8.7 | 23.7 | 10.7 |
| Control 2 Occipital Ctx | 81.8 | 81.2 | 78.5 | 29.5 |
| Control 3 Occipital Ctx | 42.9 | 38.4 | 59.0 | 19.8 |
| Control 4 Occipital Ctx | 16.4 | 16.8 | 13.3 | 7.2 |
| Control (Path) 1 Occipital Ctx | 52.1 | 71.7 | 75.8 | 25.2 |
| Control (Path) 2 Occipital Ctx | 37.4 | 39.8 | 27.2 | 16.2 |
| Control (Path) 3 Occipital Ctx | 25.5 | 17.4 | 18.8 | 100.0 |
| Control (Path) 4 Occipital Ctx | 60. 7 | 33.7 | 57.8 | 24.5 |
| Control 1 Parietal Ctx | 33.4 | 25.5 | 37.9 | 12.3 |
| Control 2 Parietal Ctx | 42.0 | 59.9 | 47.3 | 27.2 |
| Control 3 Parietal Ctx | 39.8 | 27.7 | 28.3 | 17.0 |
| Control (Path) 1 Parietal Ctx | 88.3 | 100.0 | 87.1 | 37.9 |
| Control (Path) 2 Parietal Ctx | 57.4 | 54.0 | 59.9 | 23.5 |
| Control (Path) 3 Parietal Ctx | 15.2 | 18.4 | 31.2 | 8.6 |
| Control (Path) 4 Parietal Ctx | 82.9 | 56.6 | 52.9 | 28.9 |

[0786] TABLE LD
Panel 1.3D

| | Rel. | Rel. |
|---|---|---|
| | Exp. (%) | Exp. (%) |
| | Ag2665, | Ag2778, |
| | Run | Run |
| Tissue Name | 160075204 | 164023413 |
| Liver adenocarcinoma | 5.0 | 17.3 |
| Pancreas | 3.0 | 2.3 |
| Pancreatic ca. CAPAN 2 | 1.2 | 1.2 |
| Adrenal gland | 4.7 | 2.5 |
| Thyroid | 10.4 | 15.0 |
| Salivary gland | 3.3 | 2.5 |
| Pituitary gland | 3.1 | 4.3 |
| Brain (fetal) | 1.4 | 1.1 |
| Brain (whole) | 10.3 | 12.4 |
| Brain (amygdala) | 12.7 | 14.4 |
| Brain (cerebellum) | 0.2 | 0.9 |
| Brain (hippocampus) | 100.0 | 33.2 |
| Brain (substantia nigra) | 3.7 | 4.8 |
| Brain (thalamus) | 17.9 | 18.2 |
| Cerebral Cortex | 13.9 | 22.8 |
| Spinal cord | 2.8 | 10.3 |
| glio/astro U87-MG | 0.0 | 0.0 |
| glio/astro U-118-MG | 0.0 | 0.0 |
| astrocytoma SW1783 | 1.7 | 3.7 |
| neuro*; met SK-N-AS | 0.0 | 0.0 |
| astrocytoma SF-539 | 0.2 | 1.0 |
| astrocytoma SNB-75 | 3.8 | 1.5 |
| glioma SNB-19 | 3.1 | 7.2 |
| glioma U251 | 1.3 | 0.5 |
| glioma SF-295 | 3.9 | 4.4 |
| Heart (fetal) | 36.9 | 96.6 |
| Heart | 6.3 | 21.6 |
| Skeletal muscle (fetal) | 41.5 | 100.0 |
| Skeletal muscle | 2.1 | 12.9 |
| Bone marrow | 4.4 | 3.3 |
| Thymus | 2.5 | 19.5 |
| Spleen | 28.5 | 43.8 |
| Lymph node | 6.0 | 8.2 |
| Colorectal | 0.8 | 1.0 |
| Stomach | 3.8 | 3.6 |
| Small intestine | 11.4 | 12.8 |
| Colon ca. SW480 | 6.0 | 4.2 |
| Colon ca.* SW620 (SW480 met) | 0.0 | 0.3 |
| Colon ca. HT29 | 0.0 | 0.8 |
| Colon ca. HCT-116 | 3.5 | 6.6 |
| Colon ca. CaCo-2 | 2.0 | 6.7 |
| Colon ca. tissue (ODO3866) | 1.7 | 6.0 |
| Colon ca. HCC-2998 | 7.9 | 2.2 |
| Gastric ca.* (liver met) | 2.7 | 2.2 |
| NCI-N87 | | |
| Bladder | 2.0 | 4.5 |
| Trachea | 16.6 | 19.1 |
| Kidney | 3.7 | 16.7 |
| Kidney (fetal) | 14.4 | 26.2 |
| Renal ca. 786-0 | 2.6 | 2.9 |
| Renal ca. A498 | 16.6 | 10.0 |
| Renal ca. RXF 393 | 1.0 | 3.0 |
| Renal ca. ACHN | 2.6 | 4.2 |
| Renal ca. UO-31 | 1.7 | 2.3 |
| Renal ca. TK-10 | 0.0 | 0.0 |
| Liver | 3.3 | 4.2 |
| Liver (fetal) | 21.8 | 20.6 |
| Liver ca. (hepatoblast) HepG2 | 0.3 | 1.4 |
| Lung | 57.4 | 47.0 |
| Lung (fetal) | 25.7 | 57.4 |
| Lung ca. (small cell) LX-1 | 0.5 | 1.1 |
| Lung ca. (small cell) NCI-H69 | 2.0 | 0.5 |
| Lung ca. (s. cell var.) SHP-77 | 0.9 | 0.3 |
| Lung ca. (large cell) NCI-H460 | 6.8 | 8.4 |
| Lung ca. (non-sm. cell) A549 | 4.1 | 2.1 |
| Lung ca. (non-s. cell) NCI-H23 | 8.5 | 6.1 |
| Lung ca. (non-s. cell) HOP-62 | 3.1 | 4.2 |
| Lung ca. (non-s. cl) NCI-H522 | 2.2 | 2.0 |
| Lung ca. (squam.) SW 900 | 0.5 | 0.8 |
| Lung ca. (squam.) NCI-H596 | 0.0 | 0.0 |
| Mammary gland | 17.9 | 19.3 |
| Breast ca.* (pl. ef) MCF-7 | 3.0 | 4.2 |
| Breast ca.* (pl. ef) MDA-MB-231 | 10.7 | 5.1 |
| Breast ca.* (pl. ef) T47D | 1.8 | 1.2 |
| Breast ca. BT-549 | 1.5 | 0.9 |
| Breast ca. MDA-N | 0.0 | 0.0 |
| Ovary | 5.9 | 8.1 |
| Ovarian ca. OVCAR-3 | 3.8 | 6.8 |
| Ovarian ca. OVCAR-4 | 1.0 | 1.4 |
| Ovarian ca. OVCAR-5 | 5.0 | 6.3 |
| Ovarian ca. OVCAR-8 | 2.3 | 4.9 |
| Ovarian ca. IGROV-1 | 1.8 | 1.7 |
| Ovarian ca.* (ascites) SK-OV-3 | 2.4 | 1.7 |
| Uterus | 11.7 | 14.9 |
| Placenta | 30.1 | 27.4 |
| Prostate | 7.4 | 9.2 |
| Prostate ca.* (bone met) PC-3 | 1.0 | 0.4 |
| Testis | 19.3 | 34.2 |
| Melanoma Hs688(A).T | 1.2 | 0.0 |
| Melanoma* (met) Hs688(B).T | 0.3 | 1.0 |
| Melanoma UACC-62 | 2.2 | 4.8 |
| Melanoma M14 | 1.3 | 0.9 |
| Melanoma LOX IMVI | 5.6 | 3.4 |
| Melanoma* (met) SK-MEL-5 | 2.8 | 1.8 |
| Adipose | 3.0 | 6.6 |

[0787] TABLE LE
Panel 2D

| | Rel. | Rel. |
|---|---|---|
| | Exp. (%) | Exp. (%) |
| | Ag2665, Run | Ag2778, Run |
| Tissue Name | 160093572 | 162440337 |
| Normal Colon | 7.9 | 9.2 |
| CC Well to Mod Diff (ODO3866) | 14.5 | 15.1 |
| CC Margin (ODO3866) | 5.9 | 6.5 |
| CC Gr.2 rectosigmoid (ODO3868) | 3.2 | 3.9 |
| CC Margin (ODO3868) | 4.0 | 4.0 |
| CC Mod Diff (ODO3920) | 4.3 | 4.5 |
| CC Margin (ODO3920) | 5.1 | 6.4 |
| CC Gr.2 ascend colon (ODO3921) | 8.5 | 10.2 |
| CC Margin (ODO3921) | 7.7 | 5.7 |
| CC from Partial Hepatectomy | 31.9 | 32.8 |
| (ODO4309) Mets | | |
| Liver Margin (ODO4309) | 14.1 | 15.9 |
| Colon mets to lung (OD04451-01) | 14.6 | 19.1 |
| Lung Margin (OD04451-02) | 19.9 | 26.6 |
| Normal Prostate 6546-1 | 10.4 | 50.0 |
| Prostate Cancer (OD04410) | 16.5 | 18.8 |
| Prostate Margin (OD04410) | 14.9 | 16.3 |
| Prostate Cancer (OD04720-01) | 7.5 | 10.3 |
| Prostate Margin (OD04720-02) | 18.3 | 23.5 |
| Normal Lung 061010 | 58.6 | 46.7 |
| Lung Met to Muscle (ODO4286) | 8.1 | 9.9 |
| Muscle Margin (ODO4286) | 22.1 | 25.9 |
| Lung Malignant Cancer (OD03126) | 19.3 | 28.9 |
| Lung Margin (OD03126) | 100.0 | 87.7 |
| Lung Cancer (OD04404) | 15.1 | 14.0 |
| Lung Margin (OD04404) | 53.6 | 47.0 |
| Lung Cancer (OD04565) | 2.5 | 5.8 |
| Lung Margin (OD04565) | 41.8 | 66.9 |
| Lung Cancer (OD04237-01) | 4.4 | 7.3 |
| Lung Margin (OD04237-02) | 51.8 | 68.3 |
| Ocular Mel Met to Liver | 10.7 | 16.8 |
| (ODO4310) | | |
| Liver Margin (ODO4310) | 11.4 | 16.3 |
| Melanoma Mets to Lung (OD04321) | 13.0 | 17.2 |
| Lung Margin (OD04321) | 89.5 | 95.3 |
| Normal Kidney | 14.9 | 24.5 |
| Kidney Ca, Nuclear grade 2 | 7.2 | 7.8 |
| (OD04338) | | |
| Kidney Margin (OD04338) | 29.5 | 20.2 |
| Kidney Ca Nuclear grade 1/2 | 2.8 | 3.9 |
| (OD04339) | | |
| Kidney Margin (OD04339) | 18.6 | 25.0 |
| Kidney Ca, Clear cell | 52.9 | 70.2 |
| type (OD04340) | | |
| Kidney Margin (OD04340) | 21.6 | 26.4 |
| Kidney Ca, Nuclear grade 3 | 20.6 | 30.1 |
| (OD04348) | | |
| Kidney Margin (OD04348) | 13.9 | 29.9 |
| Kidney Cancer (OD04622-01) | 18.4 | 18.7 |
| Kidney Margin (OD04622-03) | 12.1 | 9.7 |
| Kidney Cancer (OD04450-01) | 0.4 | 2.7 |
| Kidney Margin (OD04450-03) | 9.7 | 22.7 |
| Kidney Cancer 8120607 | 7.3 | 9.9 |
| Kidney Margin 8120608 | 19.2 | 22.1 |
| Kidney Cancer 8120613 | 7.8 | 11.5 |
| Kidney Margin 8120614 | 17.8 | 23.8 |
| Kidney Cancer 9010320 | 18.6 | 20.2 |
| Kidney Margin 9010321 | 32.5 | 29.9 |
| Normal Uterus | 24.8 | 25.9 |
| Uterus Cancer 064011 | 27.5 | 31.6 |
| Normal Thyroid | 14.8 | 13.8 |
| Thyroid Cancer 064010 | 7.2 | 9.4 |
| Thyroid Cancer A302152 | 5.7 | 8.2 |
| Thyroid Margin A302153 | 18.4 | 27.9 |
| Normal Breast | 25.7 | 47.6 |
| Breast Cancer (OD04566) | 8.4 | 6.3 |
| Breast Cancer (OD04590-01) | 27.4 | 27.9 |
| Breast Cancer Mets (OD04590-03) | 47.3 | 100.0 |
| Breast Cancer Metastasis | 11.6 | 12.0 |
| (OD04655-05) | | |
| Breast Cancer 064006 | 4.3 | 7.8 |
| Breast Cancer 1024 | 13.9 | 13.9 |
| Breast Cancer 9100266 | 9.9 | 15.5 |
| Breast Margin 9100265 | 3.0 | 7.7 |
| Breast Cancer A209073 | 8.0 | 10.4 |
| Breast Margin A209073 | 7.9 | 7.3 |
| Normal Liver | 3.2 | 6.2 |
| Liver Cancer 064003 | 2.2 | 1.1 |
| Liver Cancer 1025 | 7.4 | 5.4 |
| Liver Cancer 1026 | 16.8 | 17.8 |
| Liver Cancer 6004-T | 8.4 | 6.9 |
| Liver Tissue 6004-N | 2.3 | 1.6 |
| Liver Cancer 6005-T | 23.7 | 25.3 |
| Liver Tissue 6005-N | 7.9 | 10.4 |
| Normal Bladder | 15.4 | 19.5 |
| Bladder Cancer 1023 | 2.5 | 2.5 |
| Bladder Cancer A302173 | 0.9 | 0.3 |
| Bladder Cancer (OD04718-01) | 2.6 | 2.8 |
| Bladder Normal Adjacent | 19.1 | 29.5 |
| (OD04718-03) | | |
| Normal Ovary | 15.1 | 23.5 |
| Ovarian Cancer 064008 | 8.3 | 11.4 |
| Ovarian Cancer (OD04768-07) | 3.9 | 2.7 |
| Ovary Margin (OD04768-08) | 25.5 | 20.6 |
| Normal Stomach | 5.5 | 6.7 |
| Gastric Cancer 9060358 | 1.3 | 0.9 |
| Stomach Margin 9060359 | 3.0 | 3.2 |
| Gastric Cancer 9060395 | 9.8 | 13.1 |
| Stomach Margin 9060394 | 7.4 | 7.7 |
| Gastric Cancer 9060397 | 28.9 | 26.2 |
| Stomach Margin 9060396 | 3.3 | 3.1 |
| Gastric Cancer 064005 | 5.0 | 5.6 |

[0788] TABLE LF
Panel 4D

| | Rel. | Rel. |
|---|---|---|
| | Exp. (%) | Exp. (%) |
| | Ag2665, | Ag2778, |
| | Run | Run |
| Tissue Name | 158912341 | 161930458 |
| Secondary Th1 act | 0.1 | 0.0 |
| Secondary Th2 act | 0.2 | 0.2 |
| Secondary Tr1 act | 0.0 | 1.2 |
| Secondary Th1 rest | 0.0 | 0.0 |
| Secondary Th2 rest | 0.2 | 0.0 |
| Secondary Tr1 rest | 0.0 | 0.0 |
| Primary Th1 act | 0.0 | 0.7 |
| Primary Th2 act | 0.5 | 0.3 |
| Primary Tr1 act | 0.2 | 0.0 |
| Primary Th1 rest | 0.2 | 0.0 |
| Primary Th2 rest | 0.0 | 0.0 |
| Primary Tr1 rest | 0.0 | 0.0 |
| CD45RA CD4 lymphocyte act | 1.5 | 0.9 |
| CD45RO CD4 lymphocyte act | 0.1 | 0.2 |
| CD8 lymphocyte act | 0.2 | 0.0 |
| Secondary CD8 lymphocyte rest | 0.6 | 0.3 |
| Secondary CD8 lymphocyte act | 0.0 | 0.0 |
| CD4 lymphocyte none | 0.0 | 0.0 |
| 2ry Th1/Th2/Tr1_anti-CD95 CH11 | 0.0 | 0.0 |
| LAK cells rest | 0.0 | 0.0 |
| LAK cells IL-2 | 0.1 | 0.1 |
| LAK cells IL-2 + IL-12 | 0.0 | 0.0 |
| LAK cells IL-2 + IFN gamma | 0.2 | 0.0 |
| LAK cells IL-2 + IL-18 | 0.0 | 0.0 |
| LAK cells PMA/ionomycin | 0.0 | 0.4 |
| NK Cells IL-2 rest | 0.0 | 0.4 |
| Two Way MLR 3 day | 0.1 | 0.2 |
| Two Way MLR 5 day | 0.0 | 0.1 |
| Two Way MLR 7 day | 0.0 | 0.2 |
| PBMC rest | 0.0 | 0.5 |
| PBMC PWM | 0.1 | 0.0 |
| PBMC PHA-L | 0.1 | 0.0 |
| Ramos (B cell) none | 0.0 | 0.0 |
| Ramos (B cell) ionomycin | 0.0 | 0.0 |
| B lymphocytes PWM | 0.1 | 0.3 |
| B lymphocytes CD40L and IL-4 | 0.0 | 0.0 |
| EOL-1 dbcAMP | 4.5 | 4.8 |
| EOL-1 dbcAMP PMA/ionomycin | 2.0 | 0.8 |
| Dendritic cells none | 2.1 | 1.0 |
| Dendritic cells LPS | 1.4 | 2.4 |
| Dendritic cells anti-CD40 | 2.0 | 2.0 |
| Monocytes rest | 0.1 | 0.5 |
| Monocytes LPS | 0.0 | 0.2 |
| Macrophages rest | 0.9 | 0.9 |
| Macrophages LPS | 0.0 | 0.4 |
| HUVEC none | 84.1 | 71.2 |
| HUVEC starved | 48.3 | 56.6 |
| HUVEC IL-1beta | 21.6 | 15.7 |
| HUVEC IFN gamma | 64.6 | 49.7 |
| HUVEC TNF alpha + IFN gamma | 15.3 | 18.7 |
| HUVEC TNF alpha + IL4 | 19.9 | 16.2 |
| HUVEC IL-11 | 53.2 | 48.6 |
| Lung Microvascular EC none | 100.0 | 100.0 |
| Lung Microvascular EC | 27.2 | 25.3 |
| TNFalpha + IL-1beta | | |
| Microvascular Dermal EC none | 68.3 | 67.8 |
| Microsvasular Dermal EC | 25.2 | 25.9 |
| TNFalpha + IL-1beta | | |
| Bronchial epithelium | 0.2 | 5.9 |
| TNFalpha + IL1beta | | |
| Small airway epithelium none | 1.4 | 1.5 |
| Small airway epithelium | 2.0 | 4.8 |
| TNFalpha + IL-1beta | | |
| Coronery artery SMC rest | 18.2 | 14.6 |
| Coronery artery SMC | 17.4 | 10.1 |
| TNFalpha + IL-1beta | | |
| Astrocytes rest | 1.7 | 1.0 |
| Astrocytes | 0.8 | 2.5 |
| TNFalpha + IL-1beta | | |
| KU-812 (Basophil) rest | 62.0 | 50.0 |
| KU-812 (Basophil) | 25.5 | 21.6 |
| PMA/ionomycin | | |
| CCD1106 (Keratinocytes) none | 3.2 | 2.8 |
| CCD1106 (Keratinocytes) | 0.3 | 2.8 |
| TNFalpha + IL-1beta | | |
| Liver cirrhosis | 1.7 | 1.9 |
| Lupus kidney | 1.1 | 1.2 |
| NCI-H292 none | 3.2 | 3.2 |
| NCI-H292 IL-4 | 3.0 | 2.2 |
| NCI-H292 IL-9 | 5.3 | 1.9 |
| NCI-H292 IL-13 | 2.3 | 3.0 |
| NCI-H292 IFN gamma | 1.8 | 3.2 |
| HPAEC none | 0.0 | 50.3 |
| HPAEC TNF alpha + IL-1 beta | 21.9 | 34.4 |
| Lung fibroblast none | 1.1 | 1.3 |
| Lung fibroblast | 1.8 | 1.7 |
| TNF alpha + IL-1 beta | | |
| Lung fibroblast IL-4 | 0.4 | 1.3 |
| Lung fibroblast IL-9 | 1.3 | 1.8 |
| Lung fibroblast IL-13 | 2.2 | 0.5 |
| Lung fibroblast IFN gamma | 0.9 | 0.8 |
| Dermal fibroblast CCD1070 rest | 2.0 | 0.9 |
| Dermal fibroblast | 2.4 | 1.0 |
| CCD1070 TNF alpha | | |
| Dermal fibroblast | 1.5 | 0.4 |
| CCD1070 IL-1 beta | | |
| Dermal fibroblast IFN gamma | 0.9 | 0.6 |
| Dermal fibroblast IL-4 | 1.0 | 0.6 |
| IBD Colitis 2 | 0.0 | 0.0 |
| IBD Crohn's | 0.3 | 0.3 |
| Colon | 5.0 | 3.0 |
| Lung | 8.2 | 6.7 |
| Thymus | 3.7 | 3.1 |
| Kidney | 3.0 | 1.6 |

[0789] CNS_neurodegeneration_v1.0 Summary:

[0790] Ag2665/Ag2778 Four experiments with two different probe-primer sets are in good agreement. This panel confirms the expression of this gene at low levels in the brain in an independent group of individuals. This gene is found to be slightly down-regulated in the temporal cortex of Alzheimer's disease patients. Therefore, up-regulation of this gene or its protein product, or treatment with specific agonists for this receptor may be of use in reversing the dementia, memory loss, and neuronal death associated with this disease.

[0791] Panel 1.3D Summary:

[0792] Ag2665/Ag2778 Two experiments with two different probe-primer sets are in good agreement. Highest expression of this gene is detected in hippocampus and fetal skeletal muscle (CTs=26-28.7). This gene is expressed at moderate levels in all regions of the central nervous system examined, including amygdala, hippocampus, substantia nigra, thalamus, cerebellum, cerebral cortex, and spinal cord. Therefore, therapeutic modulation of this gene product may be useful in the treatment of central nervous system disorders such as Alzheimer's disease, Parkinson's disease, epilepsy, multiple sclerosis, schizophrenia and depression.

[0793] Moderate levels of expression of this gene is also seen in cluster of cancer cell lines derived from pancreatic, gastric, colon, lung, liver, renal, breast, ovarian, prostate, melanoma and brain cancers. Thus, expression of this gene could be used as a marker to detect the presence of these cancers. Furthermore, therapeutic modulation of the expression or function of this gene may be effective in the treatment of pancreatic, gastric, colon, lung, liver, renal, breast, ovarian, prostate, squamous cell carcinoma, melanoma and brain cancers.

[0794] Among tissues with metabolic or endocrine function, this gene is expressed at moderate levels in pancreas, adipose, adrenal gland, thyroid, pituitary gland, skeletal muscle, heart, liver and the gastrointestinal tract. Therefore, therapeutic modulation of the activity of this gene may prove useful in the treatment of endocrine/metabolically related diseases, such as obesity and diabetes.

[0795] Panel 2D Summary:

[0796] Ag2665/Ag2778 Two experiments with two different probe-primer sets are in good agreement. Highest expression of this gene is detected in normal lung and a metastatic breast cancer sample (CTs=27-28). This gene show significant expression in both cancer and normal tissue samples derived from colon, ovary, bladder, prostate, liver, breast, thyroid, uterus, kidney and lung. Moderate levels of expression of this gene is also seen in metastatic melanoma. Interestingly, higher expression of this gene is consistently associated with normal lung as compared to corresponding cancer sample. Therefore, expression of this gene may be used to distinguish between cancer and normal lung. Furthermore, therapeutic modulation of this gene or its protein product may be useful in the treatment of metastatic melanoma, colon, ovary, bladder, prostate, liver, breast, thyroid, uterus, kidney and lung cancers

[0797] Panel 4D Summary:

[0798] Ag2665/Ag2778 Two experiments with two different probe-primer sets are in good agreement. Highest expression of this gene in lung microvascular endothelial cells (CTs=27-28). Moderate to high levels of expression of this gene is mainly seen in endothelial cells. IL-1 beta and TNFalpha treatment reduce the expression of this gene consistently in endothelium samples including HPAEC, HUVEC and lung microvascular EC. Therefore, therapies designed with the protein encoded by this gene may be important in regulating endothelium function including leukocyte extravasation, a major component of inflammation during asthma, IBD, and psoriasis.

[0799] In addition, moderate to low levels of expression of this gene is also seen in eosinophils, dendritic cells, resting macrophage, activated CD45RA CD4 lymphocyte, lung and dermal fibroblasts and normal tissues represent by colon, lung, thymus and kidney. Therefore, therapeutic modulation of this gene product may ameliorate symptoms/conditions associated with autoimmune and inflammatory disorders including psoriasis, allergy, asthma, inflammatory bowel disease, rheumatoid arthritis and osteoarthritis

[0800] M. CG57542-01: Cadherin.

[0801] Expression of gene CG57542-01 was assessed using the primer-probe sets Ag3234, Ag3279 and Ag616, described in Tables MA, MB and MC. Results of the RTQ-PCR runs are shown in Tables MD, ME, MF, MG, MH, MI, MJ, MK and ML.

TABLE MA

Probe Name g3234

| | | | Start | SEQ ID |
|---|---|---|---|---|
| Primers | Sequences | Length | Position | No |
| Forward | 5′-gcaaaatcgtcgtctctgttac-3′ | 22 | 668 | 331 |
| Probe | TET-5′-ccctctgaaagccaccagcagtg-3′-TAMRA | 23 | 705 | 332 |
| Reverse | 5′-ccaagaggttcacaaacactgt-3′ | 22 | 730 | 333 |

[0802] TABLE MB

Probe Name Ag3279

| | | | Start | SEQ ID |
|---|---|---|---|---|
| Primers | Sequences | Length | Position | No |
| Forward | 5′-gcaaaatcgtcgtctctgttac-3′ | 22 | 668 | 334 |
| Probe | TET-5′-ccctctgaaagccaccagcagtg-3′-TAMRA | 23 | 705 | 335 |
| Reverse | 5′-ccaagaggttcacaaacactgt-3′ | 22 | 730 | 336 |

[0803] TABLE MC

Probe Name Ag616

| | | | Start | SEQ ID |
|---|---|---|---|---|
| Primers | Sequences | Length | Position | No |
| Forward | 5′-tcgttgtccgtgcagttcag-3′ | 20 | 1156 | 337 |
| Probe | TET-5′-cagaccacccggaactcgcgtg-3′-TAMRA | 22 | 1133 | 338 |
| Reverse | 5′-cggccgtgtacaatgtgtct-3′ | 20 | 1097 | 339 |

[0804] TABLE MD
CNS_neurodegeneration_v1.0

| | Rel. Exp. (%) | Rel. Exp. (%) |
|---|---|---|
| | Ag3234, Run | Ag3279, Run |
| Tissue Name | 209862304 | 210060481 |
| AD 1 Hippo | 16.3 | 21.8 |
| AD 2 Hippo | 23.8 | 32.3 |
| AD 3 Hippo | 13.2 | 14.1 |
| AD 4 Hippo | 19.8 | 22.5 |
| AD 5 hippo | 58.2 | 49.7 |
| AD 6 Hippo | 58.6 | 100.0 |
| Control 2 Hippo | 19.8 | 24.5 |
| Control 4 Hippo | 29.1 | 23.5 |
| Control (Path) 3 Hippo | 11.7 | 7.1 |
| AD 1 Temporal Ctx | 28.1 | 28.7 |
| AD 2 Temporal Ctx | 18.7 | 28.9 |
| AD 3 Temporal Ctx | 15.5 | 15.7 |
| AD 4 Temporal Ctx | 27.7 | 25.5 |
| AD 5 Inf Temporal Ctx | 38.2 | 52.1 |
| AD 5 SupTemporal Ctx | 45.7 | 49.7 |
| AD 6 Inf Temporal Ctx | 81.8 | 67.8 |
| AD 6 Sup Temporal Ctx | 100.0 | 94.6 |
| Control 1 Temporal Ctx | 10.1 | 14.2 |
| Control 2 Temporal Ctx | 15.0 | 11.9 |
| Control 3 Temporal Ctx | 8.6 | 14.7 |
| Control 4 Temporal Ctx | 8.9 | 12.1 |
| Control (Path) 1 Temporal Ctx | 23.7 | 31.0 |
| Control (Path) 2 Temporal Ctx | 14.3 | 16.6 |
| Control (Path) 3 Temporal Ctx | 14.6 | 16.2 |
| Control (Path) 4 Temporal Ctx | 26.4 | 31.2 |
| AD 1 Occipital Ctx | 17.1 | 19.2 |
| AD 2 Occipital Ctx (Missing) | 0.0 | 0.0 |
| AD 3 Occipital Ctx | 23.5 | 22.4 |
| AD 4 Occipital Ctx | 18.3 | 21.2 |
| AD 5 Occipital Ctx | 31.9 | 38.4 |
| AD 6 Occipital Ctx | 24.1 | 37.9 |
| Control 1 Occipital Ctx | 19.8 | 26.1 |
| Control 2 Occipital Ctx | 31.0 | 33.7 |
| Control 3 Occipital Ctx | 21.8 | 22.7 |
| Control 4 Occipital Ctx | 13.3 | 20.7 |
| Control (Path) 1 Occipital Ctx | 37.1 | 32.5 |
| Control (Path) 2 Occipital Ctx | 14.7 | 12.6 |
| Control (Path) 3 Occipital Ctx | 20.3 | 19.2 |
| Control (Path) 4 Occipital Ctx | 20.4 | 26.1 |
| Control 1 Parietal Ctx | 14.2 | 22.4 |
| Control 2 Parietal Ctx | 35.8 | 44.4 |
| Control 3 Parietal Ctx | 5.5 | 12.8 |
| Control (Path) 1 Parietal Ctx | 17.7 | 21.9 |
| Control (Path) 2 Parietal Ctx | 19.2 | 25.3 |
| Control (Path) 3 Parietal Ctx | 13.0 | 17.9 |
| Control (Path) 4 Parietal Ctx | 32.3 | 33.0 |

[0805] TABLE ME
General_screening_panel_v1.4

| | Rel. Exp. (%) |
|---|---|
| | Ag3279, Run |
| Tissue Name | 216512994 |
| Adipose | 35.8 |
| Melanoma* Hs688(A).T | 0.0 |
| Melanoma* Hs688(B).T | 0.0 |
| Melanoma* M14 | 0.0 |
| Melanoma* LOXIMVI | 0.0 |
| Melanoma* SK-MEL-5 | 0.1 |
| Squamous cell carcinoma SCC-4 | 0.0 |
| Testis Pool | 11.0 |
| Prostate ca.* (bone met) PC-3 | 0.1 |
| Prostate Pool | 3.8 |
| Placenta | 0.6 |
| Uterus Pool | 3.1 |
| Ovarian ca. OVCAR-3 | 10.4 |
| Ovarian ca. SK-OV-3 | 1.4 |
| Ovarian ca. OVCAR-4 | 0.0 |
| Ovarian ca. OVCAR-5 | 4.0 |
| Ovarian ca. IGROV-1 | 2.4 |
| Ovarian ca. OVCAR-8 | 1.4 |
| Ovary | 37.4 |
| Breast ca. MCF-7 | 0.1 |
| Breast ca. MDA-MB-231 | 0.0 |
| Breast ca. BT 549 | 0.0 |
| Breast ca. T47D | 5.8 |
| Breast ca. MDA-N | 0.0 |
| Breast Pool | 7.0 |
| Trachea | 4.3 |
| Lung | 16.0 |
| Fetal Lung | 24.5 |
| Lung ca. NCI-N417 | 2.2 |
| Lung ca. LX-1 | 0.3 |
| Lung ca. NCI-H146 | 0.3 |
| Lung ca. SHP-77 | 0.0 |
| Lung ca. A549 | 4.2 |
| Lung ca. NCI-H526 | 10.2 |
| Lung ca. NCI-H23 | 12.0 |
| Lung ca. NCI-H460 | 0.1 |
| Lung ca. HOP-62 | 0.0 |
| Lung ca. NCI-H522 | 6.0 |
| Liver | 9.1 |
| Fetal Liver | 3.5 |
| Liver ca. HepG2 | 0.0 |
| Kidney Pool | 34.2 |
| Fetal Kidney | 5.0 |
| Renal ca. 786-0 | 0.0 |
| Renal ca. A498 | 1.1 |
| Renal ca. ACHN | 0.0 |
| Renal ca. UO-31 | 0.1 |
| Renal ca. TK-10 | 0.0 |
| Bladder | 9.4 |
| Gastric ca. (liver met.) NCI-N87 | 0.4 |
| Gastric ca. KATO III | 0.0 |
| Colon ca. SW-948 | 0.0 |
| Colon ca. SW480 | 2.1 |
| Colon ca.* (SW480 met) SW620 | 0.7 |
| Colon ca. HT29 | 0.0 |
| Colon ca. HCT-116 | 0.2 |
| Colon ca. CaCo-2 | 1.0 |
| Colon cancer tissue | 0.8 |
| Colon ca. SW1116 | 0.0 |
| Colon ca. Colo-205 | 0.0 |
| Colon ca. SW-48 | 0.0 |
| Colon Pool | 8.0 |
| Small Intestine Pool | 12.1 |
| Stomach Pool | 6.1 |
| Bone Marrow Pool | 8.4 |
| Fetal Heart | 15.6 |
| Heart Pool | 9.4 |
| Lymph Node Pool | 13.7 |
| Fetal Skeletal Muscle | 4.7 |
| Skeletal Muscle Pool | 4.9 |
| Spleen Pool | 5.8 |
| Thymus Pool | 13.0 |
| CNS cancer (glio/astro) U87-MG | 0.2 |
| CNS cancer (glio/astro) U-118-MG | 0.0 |
| CNS cancer (neuro; met) SK-N-AS | 0.0 |
| CNS cancer (astro) SF-539 | 0.0 |
| CNS cancer (astro) SNB-75 | 0.1 |
| CNS cancer (glio) SNB-19 | 1.8 |
| CNS cancer (glio) SF-295 | 0.8 |
| Brain (Amygdala) Pool | 9.7 |
| Brain (cerebellum) | 100.0 |
| Brain (fetal) | 8.2 |
| Brain (Hippocampus) Pool | 10.2 |
| Cerebral Cortex Pool | 7.9 |
| Brain (Substantia nigra) Pool | 6.0 |
| Brain (Thalamus) Pool | 10.9 |
| Brain (whole) | 16.0 |
| Spinal Cord Pool | 8.9 |
| Adrenal Gland | 3.9 |
| Pituitary gland Pool | 0.6 |
| Salivary Gland | 2.5 |
| Thyroid (female) | 1.4 |
| Pancreatic ca. CAPAN2 | 0.0 |
| Pancreas Pool | 9.5 |

[0806] TABLE MF
Panel 1.1

| | Rel. Exp. (%) |
|---|---|
| | Ag616, Run |
| Tissue Name | 111162134 |
| Adrenal gland | 3.7 |
| Bladder | 11.7 |
| Brain (amygdala) | 0.2 |
| Brain (cerebellum) | 76.8 |
| Brain (hippocampus) | 7.4 |
| Brain (substantia nigra) | 76.3 |
| Brain (thalamus) | 16.2 |
| Cerebral Cortex | 6.0 |
| Brain (fetal) | 2.2 |
| Brain (whole) | 31.0 |
| glio/astro U-118-MG | 0.0 |
| astrocytoma SF-539 | 0.0 |
| astrocytoma SNB-75 | 0.0 |
| astrocytoma SW1783 | 0.0 |
| glioma U251 | 0.0 |
| glioma SF-295 | 0.0 |
| glioma SNB-19 | 0.0 |
| glio/astro U87-MG | 0.0 |
| neuro*; met SK-N-AS | 0.0 |
| Mammary gland | 25.0 |
| Breast ca. BT-549 | 0.0 |
| Breast ca. MDA-N | 0.0 |
| Breast ca. * (pl. ef) T47D | 0.0 |
| Breast ca.* (pl. ef) MCF-7 | 0.0 |
| Breast ca.* (pl. ef) MDA-MB-231 | 0.0 |
| Small intestine | 2.4 |
| Colorectal | 0.0 |
| Colon ca. HT29 | 0.0 |
| Colon ca. CaCo-2 | 0.0 |
| Colon ca. HCT-15 | 0.0 |
| Colon ca. HCT-116 | 0.0 |
| Colon ca. HCC-2998 | 0.0 |
| Colon ca. SW480 | 0.0 |
| Colon ca.* SW620 (SW480 met) | 0.0 |
| Stomach | 3.4 |
| Gastric ca. (liver met) NCI-N87 | 0.0 |
| Heart | 46.3 |
| Skeletal muscle (Fetal) | 19.2 |
| Skeletal muscle | 19.2 |
| Endothelial cells | 0.0 |
| Heart (Fetal) | 4.1 |
| Kidney | 0.6 |
| Kidney (fetal) | 0.2 |
| Renal ca. 786-0 | 0.0 |
| Renal ca. A498 | 0.0 |
| Renal ca. ACHN | 0.0 |
| Renal ca. TK-10 | 0.0 |
| Renal ca. UO-31 | 0.0 |
| Renal ca. RXF 393 | 0.0 |
| Liver | 26.2 |
| Liver (fetal) | 0.1 |
| Liver ca. (hepatoblast) HepG2 | 0.0 |
| Lung | 4.2 |
| Lung (fetal) | 3.8 |
| Lung ca. (non-s. cell) HOP-62 | 0.0 |
| Lung ca. (large cell)NCI-H460 | 0.0 |
| Lung ca. (non-s. cell) NCI-H23 | 6.0 |
| Lung ca. (non-s. cl) NCI-H522 | 18.6 |
| Lung ca. (non-sm. cell) A549 | 6.2 |
| Lung ca. (s. cell var.) SHP-77 | 0.0 |
| Lung ca. (small cell) LX-1 | 0.0 |
| Lung ca. (small cell) NCI-H69 | 1.5 |
| Lung ca. (squam.) SW 900 | 0.0 |
| Lung ca. (squam.) NCI-H596 | 18.4 |
| Lymph node | 3.4 |
| Spleen | 2.9 |
| Thymus | 5.6 |
| Ovary | 47.3 |
| Ovarian ca. IGROV-1 | 8.6 |
| Ovarian ca. OVCAR-3 | 13.5 |
| Ovarian ca. OVCAR-4 | 0.0 |
| Ovarian ca. OVCAR-5 | 6.8 |
| Ovarian ca. OVCAR-8 | 0.2 |
| Ovarian ca.* (ascites) SK-OV-3 | 0.1 |
| Pancreas | 100.0 |
| Pancreatic ca. CAPAN 2 | 0.0 |
| Pituitary gland | 0.0 |
| Placenta | 0.5 |
| Prostate | 0.7 |
| Prostate ca.* (bone met) PC-3 | 0.0 |
| Salivary gland | 1.8 |
| Trachea | 1.0 |
| Spinal cord | 10.4 |
| Testis | 10.2 |
| Thyroid | 0.7 |
| Uterus | 7.6 |
| Melanoma M14 | 0.0 |
| Melanoma LOX IMVI | 0.0 |
| Melanoma UACC-62 | 0.0 |
| Melanoma SK-MEL-28 | 0.0 |
| Melanoma* (met) SK-MEL-5 | 0.0 |
| Melanoma Hs688(A).T | 0.0 |
| Melanoma* (met) Hs688(B).T | 0.0 |

[0807] TABLE MG
Panel 1.2

| | Rel. Exp. (%) |
|---|---|
| | Ag616, Run |
| Tissue Name | 118515000 |
| Endothelial cells | 0.0 |
| Heart (Fetal) | 8.5 |
| Pancreas | 100.0 |
| Pancreatic ca. CAPAN 2 | 0.0 |
| Adrenal Gland | 25.5 |
| Thyroid | 8.5 |
| Salivary gland | 8.1 |
| Pituitary gland | 6.2 |
| Brain (fetal) | 17.8 |
| Brain (whole) | 52.9 |
| Brain (amygdala) | 23.5 |
| Brain (cerebellum) | 66.4 |
| Brain (hippocampus) | 21.2 |
| Brain (thalamus) | 23.3 |
| Cerebral Cortex | 0.0 |
| Spinal cord | 19.3 |
| glio/astro U87-MG | 0.0 |
| glio/astro U-118-MG | 0.0 |
| astrocytoma SW1783 | 0.0 |
| neuro*; met SK-N-AS | 0.0 |
| astrocytoma SF-539 | 0.0 |
| astrocytoma SNB-75 | 0.0 |
| glioma SNB-19 | 0.1 |
| glioma U251 | 0.0 |
| glioma SF-295 | 0.0 |
| Heart | 69.7 |
| Skeletal Muscle | 32.1 |
| Bone marrow | 6.6 |
| Thymus | 17.4 |
| Spleen | 15.6 |
| Lymph node | 15.9 |
| Colorectal Tissue | 0.0 |
| Stomach | 11.8 |
| Small intestine | 15.9 |
| Colon ca. SW480 | 0.4 |
| Colon ca.* SW620 (SW480 met) | 0.2 |
| Colon ca. HT29 | 1.0 |
| Colon ca. HCT-116 | 0.0 |
| Colon ca. CaCo-2 | 0.7 |
| Colon ca. Tissue (ODO3866) | 0.3 |
| Colon ca. HCC-2998 | 0.6 |
| Gastric ca.* (liver met) NCI-N87 | 0.2 |
| Bladder | 28.3 |
| Trachea | 7.0 |
| Kidney | 2.8 |
| Kidney (fetal) | 5.3 |
| Renal ca. 786-0 | 0.0 |
| Renal ca. A498 | 0.1 |
| Renal ca. RXF 393 | 0.0 |
| Renal ca. ACHN | 0.0 |
| Renal ca. UO-31 | 0.0 |
| Renal ca. TK-10 | 0.0 |
| Liver | 69.7 |
| Liver (fetal) | 6.6 |
| Liver ca. (hepatoblast) HepG2 | 0.0 |
| Lung | 21.5 |
| Lung (fetal) | 12.0 |
| Lung ca. (small cell) LX-1 | 0.8 |
| Lung ca. (small cell) NCI-H69 | 8.4 |
| Lung ca. (s. cell var.) SHP-77 | 0.0 |
| Lung ca. (large cell)NCI-H460 | 0.0 |
| Lung ca. (non-sm. cell) A549 | 12.8 |
| Lung ca. (non-s. cell) NCI-H23 | 11.2 |
| Lung ca. (non-s. cell) HOP-62 | 0.1 |
| Lung ca. (non-s. cl) NCI-H522 | 36.3 |
| Lung ca. (squam.) SW 900 | 1.6 |
| Lung ca. (squam.) NCI-H596 | 29.5 |
| Mammary gland | 44.1 |
| Breast ca.* (pl. ef) MCF-7 | 0.0 |
| Breast ca.* (pl. ef) MDA-MB-231 | 0.0 |
| Breast ca.* (pl. ef) T47D | 0.1 |
| Breast ca. BT-549 | 0.0 |
| Breast ca. MDA-N | 0.0 |
| Ovary | 53.2 |
| Ovarian ca. OVCAR-3 | 18.9 |
| Ovarian ca. OVCAR-4 | 0.4 |
| Ovarian ca. OVCAR-5 | 10.5 |
| Ovarian ca. OVCAR-8 | 3.6 |
| Ovarian ca. IGROV-1 | 18.8 |
| Ovarian ca. (ascites) SK-OV-3 | 1.9 |
| Uterus | 22.7 |
| Placenta | 6.7 |
| Prostate | 6.5 |
| Prostate ca.* (bone met) PC-3 | 0.0 |
| Testis | 50.3 |
| Melanoma Hs688(A).T | 0.0 |
| Melanoma* (met) Hs688(B).T | 0.0 |
| Melanoma UACC-62 | 0.0 |
| Melanoma M14 | 0.0 |
| Melanoma LOX IMVI | 0.0 |
| Melanoma* (met) SK-MEL-5 | 0.0 |

[0808] TABLE MH
Panel 1.3D

| | Rel. Exp. (%) |
|---|---|
| | Ag3234, Run |
| Tissue Name | 165524160 |
| Liver adenocarcinoma | 5.8 |
| Pancreas | 43.2 |
| Pancreatic ca. CAPAN 2 | 0.0 |
| Adrenal gland | 4.5 |
| Thyroid | 0.0 |
| Salivary gland | 6.3 |
| Pituitary gland | 1.4 |
| Brain (fetal) | 5.8 |
| Brain (whole) | 45.4 |
| Brain (amygdala) | 27.2 |
| Brain (cerebellum) | 100.0 |
| Brain (hippocampus) | 21.3 |
| Brain (substantia nigra) | 21.0 |
| Brain (thalamus) | 27.2 |
| Cerebral Cortex | 14.3 |
| Spinal cord | 35.4 |
| glio/astro U87-MG | 0.0 |
| glio/astro U-118-MG | 0.0 |
| astrocytoma SW1783 | 0.0 |
| neuro*; met SK-N-AS | 1.6 |
| astrocytoma SF-539 | 0.0 |
| astrocytoma SNB-75 | 0.0 |
| glioma SNB-19 | 0.0 |
| glioma U251 | 0.0 |
| glioma SF-295 | 0.0 |
| Heart (fetal) | 15.2 |
| Heart | 13.3 |
| Skeletal muscle (fetal) | 9.9 |
| Skeletal muscle | 11.2 |
| Bone marrow | 6.2 |
| Thymus | 18.6 |
| Spleen | 8.0 |
| Lymph node | 14.4 |
| Colorectal | 7.4 |
| Stomach | 4.5 |
| Small intestine | 16.6 |
| Colon ca. SW480 | 0.0 |
| Colon ca.* SW620 (SW480 met) | 0.0 |
| Colon ca. HT29 | 0.0 |
| Colon ca. HCT-116 | 0.0 |
| Colon ca. CaCo-2 | 0.0 |
| Colon ca. tissue (ODO3866) | 1.4 |
| Colon ca. HCC-2998 | 0.0 |
| Gastric ca.* (liver met) NCI-N87 | 0.0 |
| Bladder | 5.2 |
| Trachea | 4.1 |
| Kidney | 0.0 |
| Kidney (fetal) | 2.4 |
| Renal ca. 786-0 | 0.0 |
| Renal ca. A498 | 0.0 |
| Renal ca. RXF 393 | 0.0 |
| Renal ca. ACHN | 0.0 |
| Renal ca. UO-31 | 0.0 |
| Renal ca. TK-10 | 0.0 |
| Liver | 6.3 |
| Liver (fetal) | 2.9 |
| Liver ca. (hepatoblast) HepG2 | 0.0 |
| Lung | 12.2 |
| Lung (fetal) | 6.5 |
| Lung ca. (small cell) LX-1 | 1.4 |
| Lung ca. (small cell) NCI-H69 | 1.2 |
| Lung ca. (s. cell var.) SHP-77 | 0.0 |
| Lung ca. (large cell)NCI-H460 | 2.0 |
| Lung ca. (non-sm. cell) A549 | 4.9 |
| Lung ca. (non-s. cell) NCI-H23 | 6.2 |
| Lung ca. (non-s. cell) HOP-62 | 0.0 |
| Lung ca. (non-s. cl) NCI-H522 | 0.6 |
| Lung ca. (squam.) SW 900 | 0.7 |
| Lung ca. (squam.) NCI-H596 | 7.4 |
| Mammary gland | 28.9 |
| Breast ca.* (pl. ef) MCF-7 | 0.0 |
| Breast ca.* (pl. ef) MDA-MB-231 | 0.0 |
| Breast ca.* (pl. ef) T47D | 0.0 |
| Breast ca. BT-549 | 0.0 |
| Breast ca. MDA-N | 0.0 |
| Ovary | 50.7 |
| Ovarian ca. OVCAR-3 | 7.1 |
| Ovarian ca. OVCAR-4 | 1.3 |
| Ovarian ca. OVCAR-5 | 6.0 |
| Ovarian ca. OVCAR-8 | 3.0 |
| Ovarian ca. IGROV-1 | 1.6 |
| Ovarian ca.* (ascites) SK-OV-3 | 1.2 |
| Uterus | 42.6 |
| Placenta | 1.7 |
| Prostate | 3.4 |
| Prostate ca.* (bone met) PC-3 | 0.0 |
| Testis | 15.6 |
| Melanoma Hs688(A).T | 0.0 |
| Melanoma* (met) Hs688(B).T | 0.0 |
| Melanoma UACC-62 | 0.0 |
| Melanoma M14 | 0.0 |
| Melanoma LOX IMVI | 0.0 |
| Melanoma* (met) SK-MEL-5 | 0.0 |
| Adipose | 28.1 |

[0809] TABLE MI
Panel 2.2

| | Rel. Exp. (%) |
|---|---|
| | Ag3234, Run |
| Tissue Name | 174442923 |
| Normal Colon | 7.1 |
| Colon cancer (OD06064) | 6.7 |
| Colon Margin (OD06064) | 5.6 |
| Colon cancer (OD06159) | 0.0 |
| Colon Margin (OD06159) | 5.9 |
| Colon cancer (OD06297-04) | 0.0 |
| Colon Margin (OD06297-05) | 2.9 |
| CC Gr 2 ascend colon (ODO3921) | 1.8 |
| CC Margin (ODO3921) | 0.0 |
| Colon cancer metastasis (OD06104) | 1.2 |
| Lung Margin (OD06104) | 0.7 |
| Colon mets to lung (OD04451-01) | 0.0 |
| Lung Margin (OD04451-02) | 57.4 |
| Normal Prostate | 2.6 |
| Prostate Cancer (OD04410) | 0.0 |
| Prostate Margin (OD04410) | 7.7 |
| Normal Ovary | 100.0 |
| Ovarian cancer (OD06283-03) | 5.4 |
| Ovarian Margin (OD06283-07) | 27.9 |
| Ovarian Cancer 064008 | 12.9 |
| Ovarian cancer (OD06145) | 12.7 |
| Ovarian Margin (OD06145) | 19.3 |
| Ovarian cancer (OD06455-03) | 8.1 |
| Ovarian Margin (OD06455-07) | 25.9 |
| Normal Lung | 14.8 |
| Invasive poor diff. lung adeno (ODO4945-01 | 0.5 |
| Lung Margin (ODO4945-03) | 28.7 |
| Lung Malignant Cancer (OD03126) | 7.0 |
| Lung Margin (OD03126) | 3.2 |
| Lung Cancer (OD05014A) | 3.8 |
| Lung Margin (OD05014B) | 28.5 |
| Lung cancer (OD06081) | 3.1 |
| Lung Margin (OD06081) | 18.2 |
| Lung Cancer (OD04237-01) | 2.7 |
| Lung Margin (OD04237-02) | 12.2 |
| Ocular Melanoma Metastasis | 0.0 |
| Ocular Melanoma Margin (Liver) | 22.2 |
| Melanoma Metastasis | 0.0 |
| Melanoma Margin (Lung) | 18.4 |
| Normal Kidney | 1.2 |
| Kidney Ca, Nuclear grade 2 (OD04338) | 6.7 |
| Kidney Margin (OD04338) | 1.7 |
| Kidney Ca Nuclear grade 1/2 (OD04339) | 22.1 |
| Kidney Margin (OD04339) | 5.0 |
| Kidney Ca, Clear cell type (OD04340) | 3.5 |
| Kidney Margin (OD04340) | 3.7 |
| Kidney Ca, Nuclear grade 3 (OD04348) | 0.8 |
| Kidney Margin (OD04348) | 4.8 |
| Kidney malignant cancer (OD06204B) | 22.2 |
| Kidney normal adjacent tissue (OD06204E) | 3.4 |
| Kidney Cancer (OD04450-01) | 0.0 |
| Kidney Margin (OD04450-03) | 1.8 |
| Kidney Cancer 8120613 | 0.0 |
| Kidney Margin 8120614 | 1.4 |
| Kidney Cancer 9010320 | 0.0 |
| Kidney Margin 9010321 | 1.3 |
| Kidney Cancer 8120607 | 1.9 |
| Kidney Margin 8120608 | 1.5 |
| Normal Uterus | 33.9 |
| Uterine Cancer 064011 | 6.7 |
| Normal Thyroid | 1.3 |
| Thyroid Cancer 064010 | 0.0 |
| Thyroid Cancer A302152 | 1.8 |
| Thyroid Margin A302153 | 0.8 |
| Normal Breast | 22.5 |
| Breast Cancer (OD04566) | 3.9 |
| Breast Cancer 1024 | 11.4 |
| Breast Cancer (OD04590-01) | 20.0 |
| Breast Cancer Mets (OD04590-03) | 17.2 |
| Breast Cancer Metastasis (OD04655-05) | 31.0 |
| Breast Cancer 064006 | 3.9 |
| Breast Cancer 9100266 | 10.0 |
| Breast Margin 9100265 | 16.8 |
| Breast Cancer A209073 | 10.4 |
| Breast Margin A2090734 | 28.1 |
| Breast cancer (OD06083) | 12.6 |
| Breast cancer node metastasis (OD06083) | 13.7 |
| Normal Liver | 41.5 |
| Liver Cancer 1026 | 10.5 |
| Liver Cancer 1025 | 40.1 |
| Liver Cancer 6004-T | 21.0 |
| Liver Tissue 6004-N | 3.4 |
| Liver Cancer 6005-T | 59.9 |
| Liver Tissue 6005-N | 59.5 |
| Liver Cancer 064003 | 10.4 |
| Normal Bladder | 7.6 |
| Bladder Cancer 1023 | 2.5 |
| Bladder Cancer A302173 | 1.4 |
| Normal Stomach | 12.3 |
| Gastric Cancer 9060397 | 1.0 |
| Stomach Margin 9060396 | 1.6 |
| Gastric Cancer 9060395 | 1.3 |
| Stomach Margin 9060394 | 3.1 |
| Gastric Cancer 064005 | 0.0 |

[0810] TABLE MJ
Panel 4D

| | Rel. | Rel. |
|---|---|---|
| | Exp. (%) | Exp. (%) |
| | Ag3234, | Ag3279, |
| | Run | Run |
| Tissue Name | 164328482 | 164634320 |
| Secondary Th1 act | 0.0 | 0.0 |
| Secondary Th2 act | 0.2 | 0.0 |
| Secondary Tr1 act | 0.0 | 0.0 |
| Secondary Th1 rest | 0.6 | 0.2 |
| Secondary Th2 rest | 0.0 | 0.0 |
| Secondary Tr1 rest | 0.3 | 0.1 |
| Primary Th1 act | 0.2 | 0.1 |
| Primary Th2 act | 0.0 | 0.0 |
| Primary Tr1 act | 0.0 | 0.9 |
| Primary Th1 rest | 0.7 | 0.9 |
| Primary Th2 rest | 0.2 | 0.2 |
| Primary Tr1 rest | 0.8 | 0.2 |
| CD45RA CD4 lymphocyte act | 0.0 | 0.0 |
| CD45RO CD4 lymphocyte act | 0.0 | 0.0 |
| CD8 lymphocyte act | 0.0 | 0.0 |
| Secondary CD8 lymphocyte rest | 0.0 | 0.0 |
| Secondary CD8 lymphocyte act | 0.0 | 0.0 |
| CD4 lymphocyte none | 0.2 | 0.7 |
| 2ry Th1/Th2/Tr1_anti-CD95 CH11 | 0.2 | 0.0 |
| LAK cells rest | 6.2 | 7.6 |
| LAK cells IL-2 | 0.0 | 0.0 |
| LAK cells IL-2 + IL-12 | 0.0 | 0.0 |
| LAK cells IL-2 + IFN gamma | 0.1 | 0.4 |
| LAK cells IL-2 + IL-18 | 0.4 | 0.0 |
| LAK cells PMA/ionomycin | 1.3 | 2.7 |
| NK Cells IL-2 rest | 0.0 | 0.0 |
| Two Way MLR 3 day | 1.1 | 1.3 |
| Two Way MLR 5 day | 1.3 | 0.6 |
| Two Way MLR 7 day | 0.8 | 0.4 |
| PBMC rest | 3.3 | 3.1 |
| PBMC PWM | 0.0 | 0.1 |
| PBMC PHA-L | 0.1 | 0.0 |
| Ramos (B cell) none | 0.0 | 0.0 |
| Ramos (B cell) ionomycin | 0.0 | 0.0 |
| B lymphocytes PWM | 0.0 | 0.0 |
| B lymphocytes CD40L and IL-4 | 0.0 | 0.3 |
| EOL-1 dbcAMP | 0.0 | 0.2 |
| EOL-1 dbcAMP PMA/ionomycin | 0.1 | 0.0 |
| Dendritic cells none | 25.9 | 49.0 |
| Dendritic cells LPS | 61.1 | 92.0 |
| Dendritic cells anti-CD40 | 100.0 | 94.6 |
| Monocytes rest | 12.2 | 23.0 |
| Monocytes LPS | 2.6 | 2.5 |
| Macrophages rest | 92.0 | 100.0 |
| Macrophages LPS | 10.4 | 18.0 |
| HUVEC none | 0.0 | 0.0 |
| HUVEC starved | 0.0 | 0.0 |
| HUVEC IL-1beta | 0.0 | 0.0 |
| HUVEC IFN gamma | 0.0 | 0.0 |
| HUVEC TNF alpha + IFN gamma | 0.0 | 0.0 |
| HUVEC TNF alpha + IL4 | 0.0 | 0.0 |
| HUVEC IL-11 | 0.0 | 0.0 |
| Lung Microvascular EC none | 0.0 | 0.0 |
| Lung Microvascular EC | 0.0 | 0.0 |
| TNFalpha + IL-1beta | | |
| Microvascular Dermal EC none | 0.0 | 0.0 |
| Microsvasular Dermal EC | 0.0 | 0.0 |
| TNFalpha + IL-1beta | | |
| Bronchial epithelium | 0.0 | 0.0 |
| TNFalpha + IL1beta | | |
| Small airway epithelium none | 0.0 | 0.0 |
| Small airway epithelium | 0.0 | 0.0 |
| TNFalpha + IL-1beta | | |
| Coronery artery SMC rest | 0.0 | 0.0 |
| Coronery artery SMC | 0.0 | 0.0 |
| TNFalpha + IL-1beta | | |
| Astrocytes rest | 0.0 | 0.0 |
| Astrocytes | 0.0 | 0.0 |
| TNFalpha + IL-1beta | | |
| KU-812 (Basophil) rest | 0.5 | 0.0 |
| KU-812 (Basophil) PMA/ionomycin | 0.2 | 0.3 |
| CCD1106 (Keratinocytes) none | 0.0 | 0.0 |
| CCD1106 (Keratinocytes) | 0.0 | 0.0 |
| TNFalpha + IL-1beta | | |
| Liver cirrhosis | 1.4 | 1.2 |
| Lupus kidney | 0.4 | 0.2 |
| NCI-H292 none | 0.0 | 0.2 |
| NCI-H292 IL-4 | 0.0 | 0.0 |
| NCI-H292 IL-9 | 0.0 | 0.0 |
| NCI-H292 IL-13 | 0.0 | 0.0 |
| NCI-H292 IFN gamma | 0.0 | 0.2 |
| HPAEC none | 0.0 | 0.0 |
| HPAEC TNF alpha + IL-1 beta | 0.0 | 0.0 |
| Lung fibroblast none | 0.0 | 0.0 |
| Lung fibroblast | 0.0 | 0.0 |
| TNF alpha + IL-1 beta | | |
| Lung fibroblast IL-4 | 0.0 | 0.0 |
| Lung fibroblast IL-9 | 0.0 | 0.0 |
| Lung fibroblast IL-13 | 0.0 | 0.0 |
| Lung fibroblast IFN gamma | 0.0 | 0.0 |
| Dermal fibroblast CCD1070 rest | 0.0 | 0.0 |
| Dermal fibroblast CCD1070 TNF | 0.2 | 0.6 |
| alpha | | |
| Dermal fibroblast | 0.0 | 0.0 |
| CCD1070 IL-1beta | | |
| Dermal fibroblast IFN gamma | 0.0 | 0.2 |
| Dermal fibroblast IL-4 | 0.2 | 0.0 |
| IBD Colitis 2 | 0.0 | 0.7 |
| IBD Crohn's | 0.3 | 0.7 |
| Colon | 3.0 | 2.8 |
| Lung | 7.4 | 9.7 |
| Thymus | 1.2 | 3.7 |
| Kidney | 35.4 | 33.4 |

[0811] TABLE MK
Panel CNS_1

| | Rel. Exp. (%) |
|---|---|
| | Ag3279, Run |
| Tissue Name | 171694591 |
| BA4 Control | 3.2 |
| BA4 Control2 | 10.0 |
| BA4 Alzheimer's2 | 3.8 |
| BA4 Parkinson's | 6.5 |
| BA4 Parkinson's2 | 11.7 |
| BA4 Huntington's | 7.6 |
| BA4 Huntington's2 | 4.5 |
| BA4 PSP | 5.1 |
| BA4 PSP2 | 8.8 |
| BA4 Depression | 6.7 |
| BA4 Depression2 | 7.4 |
| BA7 Control | 4.5 |
| BA7 Control2 | 1.9 |
| BA7 Alzheimer's2 | 1.0 |
| BA7 Parkinson's | 24.1 |
| BA7 Parkinson's2 | 17.4 |
| BA7 Huntington's | 6.3 |
| BA7 Huntington's2 | 28.5 |
| BA7 PSP | 18.9 |
| BA7 PSP2 | 3.8 |
| BA7 Depression | 1.7 |
| BA9 Control | 5.3 |
| BA9 Control2 | 4.1 |
| BA9 Alzheimer's | 3.6 |
| BA9 Alzheimer's2 | 8.8 |
| BA9 Parkinson's | 18.6 |
| BA9 Parkinson's2 | 20.4 |
| BA9 Huntington's | 15.0 |
| BA9 Huntington's2 | 7.4 |
| BA9 PSP | 5.3 |
| BA9 PSP2 | 1.6 |
| BA9 Depression | 4.7 |
| BA9 Depression2 | 4.5 |
| BA17 Control | 20.2 |
| BA17 Control2 | 7.9 |
| BA17 Alzheimer's2 | 3.2 |
| BA17 Parkinson's | 14.1 |
| BA17 Parkinson's2 | 8.7 |
| BA17 Huntington's | 22.2 |
| BA17 Huntington's2 | 18.2 |
| BA17 Depression | 4.9 |
| BA17 Depression2 | 19.9 |
| BA17 PSP | 13.4 |
| BA17 PSP2 | 5.3 |
| Sub Nigra Control | 58.6 |
| Sub Nigra Control2 | 21.3 |
| Sub Nigra Alzheimer's2 | 12.2 |
| Sub Nigra Parkinson's2 | 63.3 |
| Sub Nigra Huntington's | 100.0 |
| Sub Nigra Huntington's2 | 87.1 |
| Sub Nigra PSP2 | 16.8 |
| Sub Nigra Depression | 7.9 |
| Sub Nigra Depression2 | 24.3 |
| Glob Palladus Control | 24.3 |
| Glob Palladus Control2 | 8.1 |
| Glob Palladus Alzheimer's | 14.9 |
| Glob Palladus Alzheimer's2 | 1.2 |
| Glob Palladus Parkinson's | 33.0 |
| Glob Palladus Parkinson's2 | 2.0 |
| Glob Palladus PSP | 3.0 |
| Glob Palladus PSP2 | 6.0 |
| Glob Palladus Depression | 8.8 |
| Temp Pole Control | 5.9 |
| Temp Pole Control2 | 11.7 |
| Temp Pole Alzheimer's | 7.4 |
| Temp Pole Alzheimer's2 | 3.0 |
| Temp Pole Parkinson's | 11.9 |
| Temp Pole Parkinson's2 | 7.9 |
| Temp Pole Huntington's | 8.8 |
| Temp Pole PSP | 4.7 |
| Temp Pole PSP2 | 0.0 |
| Temp Pole Depression2 | 12.6 |
| Cing Gyr Control | 18.0 |
| Cing Gyr Control2 | 20.2 |
| Cing Gyr Alzheimer's | 8.6 |
| Cing Gyr Alzheimer's2 | 4.2 |
| Cing Gyr Parkinson's | 12.2 |
| Cing Gyr Parkinson's2 | 15.3 |
| Cing Gyr Huntington's | 28.1 |
| Cing Gyr Huntington's2 | 4.7 |
| Cing Gyr PSP | 7.8 |
| Cing Gyr PSP2 | 11.2 |
| Cing Gyr Depression | 2.9 |
| Cing Gyr Depression2 | 8.7 |

[0812] TABLE ML
general oncology screening panel_v_2.4

| | Rel. | Rel. |
|---|---|---|
| | Exp. (%) | Exp. (%) |
| | Ag3279, Run | Ag3279, Run |
| Tissue Name | 264978500 | 267936331 |
| Colon cancer 1 | 0.7 | 0.6 |
| Colon cancer NAT 1 | 1.3 | 1.5 |
| Colon cancer 2 | 3.3 | 4.1 |
| Colon cancer NAT 2 | 0.7 | 0.6 |
| Colon cancer 3 | 1.6 | 1.4 |
| Colon cancer NAT 3 | 2.2 | 2.1 |
| Colon malignant cancer 4 | 1.7 | 1.9 |
| Colon normal adjacent tissue 4 | 1.3 | 0.9 |
| Lung cancer 1 | 3.8 | 3.6 |
| Lung NAT 1 | 1.5 | 1.7 |
| Lung cancer 2 | 4.5 | 7.2 |
| Lung NAT 2 | 4.1 | 6.3 |
| Squamous cell carcinoma 3 | 4.7 | 7.0 |
| Lung NAT 3 | 0.2 | 0.4 |
| metastatic melanoma 1 | 46.0 | 40.3 |
| Melanoma 2 | 1.4 | 0.8 |
| Melanoma 3 | 2.3 | 1.7 |
| metastatic melanoma 4 | 67.4 | 80.1 |
| metastatic melanoma 5 | 100.0 | 100.0 |
| Bladder cancer 1 | 0.6 | 1.0 |
| Bladder cancer NAT 1 | 0.0 | 0.0 |
| Bladder cancer 2 | 1.9 | 0.9 |
| Bladder cancer NAT 2 | 0.4 | 0.2 |
| Bladder cancer NAT 3 | 0.3 | 0.7 |
| Bladder cancer NAT 4 | 2.5 | 0.8 |
| Prostate adenocarcinoma 1 | 54.0 | 70.7 |
| Prostate adenocarcinoma 2 | 2.2 | 2.4 |
| Prostate adenocarcinoma 3 | 4.5 | 6.2 |
| Prostate adenocarcinoma 4 | 2.1 | 0.8 |
| Prostate cancer NAT 5 | 1.9 | 4.8 |
| Prostate adenocarcinoma 6 | 1.0 | 1.5 |
| Prostate adenocarcinoma 7 | 4.0 | 3.3 |
| Prostate adenocarcinoma 8 | 0.9 | 1.6 |
| Prostate adenocarcinoma 9 | 60.7 | 54.3 |
| Prostate cancer NAT 10 | 0.5 | 0.8 |
| Kidney cancer 1 | 4.1 | 6.0 |
| KidneyNAT 1 | 5.1 | 5.4 |
| Kidney cancer 2 | 8.1 | 7.5 |
| Kidney NAT 2 | 2.2 | 3.7 |
| Kidney cancer 3 | 2.3 | 1.4 |
| Kidney NAT 3 | 1.9 | 1.4 |
| Kidney cancer 4 | 1.8 | 1.8 |
| Kidney NAT 4 | 0.6 | 1.9 |

[0813] CNS_neurodegeneration_v1.0 Summary:

[0814] Ag3234/Ag3279 Two experiments with the same probe and primer set produce results that are in excellent agreement. Both experiments show a difference in expression of this gene between Alzheimer's diseased postmortem brains and controls for this gene. Expression is increased in the temporal cortex of patients with AD (p=0.016 for ag3234 and p=0.024 for ag3279) and in the hippocampus. Both the temporal cortex and hippocampus are regions that show severe neurodegeneration in AD. In contrast, expression in the occipital cortex, a region that does not degenerate in Alzheimer's disease, is not disregulated. Together, these data suggest that the Cadherin protein encoded by this gene may be involved in the pathology or response to Alzheimer's disease. Therefore, this may be a useful drug target for the treatment of this disease.

[0815] General_Screening_Panel_v1.4 Summary:

[0816] Ag3279 Highest expression of this gene is in the cerebellum (CT=25.9). Significant levels of expression are also seen in other regions of the brain including the amygdala, hippocampus, cerebral cortex, substantia nigra, and thalamus. Cadherins can act as axon guidance and cell adhesion proteins, specifically during development and in the response to injury (ref 1). Manipulation of levels of this protein may be of use in inducing a compensatory synaptogenic response to neuronal death in Alzheimer's disease, Parkinson's disease, Huntington's disease, spinocerebellar ataxia, progressive supranuclear palsy, ALS, head trauma, stroke, or any other disease/condition associated with neuronal loss.

[0817] In addition, this gene is highly expressed in pituitary gland, adrenal gland, thyroid, pancreas, adult and fetal skeletal muscle, heart and liver, reflecting the widespread role of cadherins in cell-cell adhesion. This observation may suggest that this gene plays a role in normal metabolic and neuroendocrine function and that disregulated expression of this gene may contribute to metabolic diseases (such as obesity and diabetes) or neuroendocrine disorders.

[0818] Overall, gene expression is associated with normal tissues rather than cancer cell lines. Loss of function of the related E-cadherin protein has been described in many tumors, along with an increased invasiveness and a decreased prognosis of many carcinomas, including tumors of endocrine glands and their target systems (ref 2). Thus, this gene product might similarly be useful as a protein therapeutic to treat a variety of tumors, since it is found in normal cells but missing from cancer cells.

[0819] References:

[0820] 1. Ranscht B. (2000) Cadherins: molecular codes for axon guidance and synapse formation. Int. J. Dev. Neurosci. 18: 643-651. PMID: 10978842

[0821] 2. Potter E., Bergwitz C., Brabant G. (1999) The cadherin-catenin system: implications for growth and differentiation of endocrine tissues. Endocr. Rev. 20: 207-239. PMID: 10204118

[0822] Panel 1.1 Summary:

[0823] Ag616 Highest expression of this gene, a cadherin homolog, is seen in pancreas (CT=23.2). Significant expression is also seen in adrenal gland, fetal and adult skeletal muscle, liver and heart. This widespread expression among tissues with metabolic function is consistent with expression seen in General_screening_panel_v1.4. Please see that panel for further discussion of utility of this gene in metabolic disorders.

[0824] In addition, there is higher expression in adult liver (CT=27) when compared to expression in fetal liver (CT=34.8). Thus, expression of this gene could be used to differentiate between fetal and adult liver.

[0825] Overall, expression in this panel is in agreement with expression in the previous panel. Please see that panel for further discussion of utility of this gene.

[0826] Panel 1.2 Summary:

[0827] Ag616 The expression of this gene in this panel is in agreement with expression in the panels 1.1 and 1.4. Please see these panels for further discussion of utility of this gene.

[0828] Panel 1.3D Summary:

[0829] Ag3234 The expression of this gene in this panel is in agreement with expression in the panels 1.4. See panel 1.4 for further discussion.

[0830] Panel 2.2 Summary:

[0831] Ag3234 The expression of this gene appears to be highest in a sample derived from a normal ovarian tissue (CT=32.3). In addition, there appears to be substantial expression in other samples derived from liver cancers. Furthermore, there appears to be expression specific to normal lung tissue when compared to malignant lung tissue. Thus, the expression of this gene could be used to distinguish normal ovarian tissue from other samples in the panel. Moreover, therapeutic modulation of this gene, through the use of small molecule drugs, protein therapeutics or antibodies could be of benefit in the treatment of liver cancer, ovarian cancer or lung cancer.

[0832] Panel 4D Summary:

[0833] Ag3234/Ag3279 The this gene, a cadherin 23-like molecule, is expressed selectively at moderate levels (CTs=28.1-30.1) in resting and activated dendritic cells, and in resting and activated macrophages. Thus, small molecule antagonists or therapeutic antibodies that block the function of the cadherin 23-like molecule encoded by this gene may be useful in the reduction or elimination of the symptoms in patients with autoimmune and inflammatory diseases in which dendritic cells and macrophages play an important role in antigen presentation and other functions, such as, but not limited to, including Crohn's disease, ulcerative colitis, multiple sclerosis, chronic obstructive pulmonary disease, asthma, emphysema, rheumatoid arthritis, lupus erythematosus, or psoriasis.

[0834] Panel CNS_{—}1 Summary:

[0835] Ag3279 This panel confirms expression of this gene in the brain. See Panel 1.4 for discussion of utility of this gene in the central nervous system.

[0836] General Oncology Screening Panel_V_{—}2.4 Summary:

[0837] Ag3234/Ag3279 Two experiments with same probe-primer sets are in excellent agreement. Highest expression of this gene is detected in metastatic melanoma sample (CTs=27-29). High expression of this gene is detected in metastic melanoma and prostate adenocarcinoma. Therefore, expression of this gene may be used as diagnostic marker to detect the presence of prostate cancer and metastatic melanoma. In addition, moderate to low levels of expression of this gene is also detected in normal and cancer samples derived from colon, lung and kidney. Therefore, therapeutic modulation of this gene or its protein product through the use of protein therapeutics, antibodies or small molecules may be useful in the treatment of metastatic melanoma, prostate, colon, lung and kidney cancers.

[0838] N. CG89285-03: Alpha-1-Antichymotrypsin.

[0839] Expression of gene CG89285-03 was assessed using the primer-probe set Ag5223, described in Table NA. Results of the RTQ-PCR runs are shown in Table NB.

TABLE NA

Probe Name Ag5223

| | | | Start | SEQ ID |
|---|---|---|---|---|
| Primers | Sequences | Length | Position | No |
| Forward | 5′-atggtcctggtgaattacat-3′ | 20 | 661 | 340 |
| Probe | TET-5′-cttctttaaagagagataggtgagctctac-3′-TAMRA | 30 | 681 | 341 |
| Reverse | 5′-ctcaaatacatcaagcacag-3′ | 20 | 856 | 342 |

[0840] TABLE NB
General_screening_panel_v1.5

| | Rel. Exp. (%) |
|---|---|
| | Ag5223, Run |
| Tissue Name | 229514473 |
| Adipose | 0.0 |
| Melanoma* Hs688(A).T | 0.0 |
| Melanoma* Hs688(B).T | 0.0 |
| Melanoma* M14 | 0.0 |
| Melanoma* LOXIMVI | 0.0 |
| Melanoma* SK-MEL-5 | 13.9 |
| Squamous cell carcinoma SCC-4 | 0.0 |
| Testis Pool | 0.0 |
| Prostate ca.* (bone met) PC-3 | 0.0 |
| Prostate Pool | 0.0 |
| Placenta | 0.0 |
| Uterus Pool | 0.0 |
| Ovarian ca. OVCAR-3 | 0.0 |
| Ovarian ca. SK-OV-3 | 0.0 |
| Ovarian ca. OVCAR-4 | 0.0 |
| Ovarian ca. OVCAR-5 | 0.0 |
| Ovarian ca. IGROV-1 | 0.0 |
| Ovarian ca. OVCAR-8 | 15.6 |
| Ovary | 0.0 |
| Breast ca. MCF-7 | 0.0 |
| Breast ca. MDA-MB-231 | 0.0 |
| Breast ca. BT 549 | 0.0 |
| Breast ca. T47D | 0.0 |
| Breast ca. MDA-N | 0.0 |
| Breast Pool | 0.0 |
| Trachea | 9.1 |
| Lung | 0.0 |
| Fetal Lung | 4.8 |
| Lung ca. NCI-N417 | 0.0 |
| Lung ca. LX-1 | 0.0 |
| Lung ca. NCI-H146 | 0.0 |
| Lung ca. SHP-77 | 0.0 |
| Lung ca. A549 | 0.0 |
| Lung ca. NCI-H526 | 0.0 |
| Lung ca. NCI-H23 | 0.0 |
| Lung ca. NCI-H460 | 0.0 |
| Lung ca. HOP-62 | 0.0 |
| Lung ca. NCI-H522 | 0.0 |
| Liver | 11.0 |
| Fetal Liver | 32.8 |
| Liver ca. HepG2 | 100.0 |
| Kidney Pool | 0.0 |
| Fetal Kidney | 0.0 |
| Renal ca. 786-0 | 0.0 |
| Renal ca. A498 | 0.0 |
| Renal ca. ACHN | 0.0 |
| Renal ca. UO-31 | 0.0 |
| Renal ca. TK-10 | 47.6 |
| Bladder | 80.7 |
| Gastric ca. (liver met.) NCI-N87 | 0.0 |
| Gastric ca. KATO III | 0.0 |
| Colon ca. SW-948 | 0.0 |
| Colon ca. SW480 | 0.0 |
| Colon ca.* (SW480 met) SW620 | 0.0 |
| Colon ca. HT29 | 0.0 |
| Colon ca. HCT-116 | 0.0 |
| Colon ca. CaCo-2 | 0.0 |
| Colon cancer tissue | 0.0 |
| Colon ca. SW1116 | 0.0 |
| Colon ca. Colo-205 | 0.0 |
| Colon ca. SW-48 | 0.0 |
| Colon Pool | 0.0 |
| Small Intestine Pool | 0.0 |
| Stomach Pool | 4.0 |
| Bone Marrow Pool | 0.0 |
| Fetal Heart | 0.0 |
| Heart Pool | 0.0 |
| Lymph Node Pool | 0.0 |
| Fetal Skeletal Muscle | 0.0 |
| Skeletal Muscle Pool | 9.2 |
| Spleen Pool | 0.0 |
| Thymus Pool | 0.0 |
| CNS cancer (glio/astro) U87-MG | 0.0 |
| CNS cancer (glio/astro) U-118-MG | 0.0 |
| CNS cancer (neuro; met) SK-N-AS | 0.0 |
| CNS cancer (astro) SF-539 | 0.0 |
| CNS cancer (astro) SNB-75 | 4.9 |
| CNS cancer (glio) SNB-19 | 0.0 |
| CNS cancer (glio) SF-295 | 21.2 |
| Brain (Amygdala) Pool | 0.0 |
| Brain (cerebellum) | 0.0 |
| Brain (fetal) | 0.0 |
| Brain (Hippocampus) Pool | 2.3 |
| Cerebral Cortex Pool | 0.0 |
| Brain (Substantia nigra) Pool | 0.0 |
| Brain (Thalamus) Pool | 0.0 |
| Brain (whole) | 3.2 |
| Spinal Cord Pool | 18.9 |
| Adrenal Gland | 0.0 |
| Pituitary gland Pool | 0.0 |
| Salivary Gland | 0.0 |
| Thyroid (female) | 0.0 |
| Pancreatic ca. CAPAN2 | 0.0 |
| Pancreas Pool | 9.1 |

[0841] CNS_Neurodegeneration_v1.0 Summary:

[0842] Ag5223 Expression of this gene is low/undetectable in all samples on this panel (CTs>35).

[0843] General_Screening_Panel_v1.5 Summary:

[0844] Ag5223 Expression of this gene is restricted to a sample derived from a liver cancer cell line (CT=34.5) and normal bladder. Thus, expression of this gene could be used to differentiate between this sample and other samples on this panel and as a marker to detect the presence of liver cancer. Furthermore, therapeutic modulation of the expression or function of this gene may be effective in the treatment of liver cancer.

[0845] Panel 4.1D Summary:

[0846] Ag5223 Expression of this gene is low/undetectable in all samples on this panel (CTs>35).

[0847] O. CG89285-04: Alpha-1-Antichymotrypsin.

[0848] Expression of gene CG89285-04 was assessed using the primer-probe set Ag523 1, described in Table OA. Results of the RTQ-PCR runs are shown in Table OB.

TABLE QA

Probe Name Ag5231

| | | | Start | SEQ ID |
|---|---|---|---|---|
| Primers | Sequences | Length | Position | No |
| Forward | 5′-ctgacctgtcaaggaccattg-3′ | 21 | 1085 | 343 |
| Probe | TET-5′-tcaacaggcccttcctgatgatcatt-3′-TAMRA | 26 | 1112 | 344 |
| Reverse | 5′-ccagtttgaattccaagttcct-3′ | 22 | 1232 | 345 |

[0849] TABLE OB
General_screening_panel_v1.5

| | Rel. Exp. (%) |
|---|---|
| | Ag5231, Run |
| Tissue Name | 229385251 |
| Adipose | 0.0 |
| Melanoma* Hs688(A).T | 0.0 |
| Melanoma* HS688(B).T | 0.0 |
| Melanoma* M14 | 0.0 |
| Melanoma* LOXIMVI | 0.0 |
| Melanoma* SK-MEL-5 | 2.9 |
| Squamous cell carcinoma SCC-4 | 0.0 |
| Testis Pool | 0.0 |
| Prostate ca.* (bone met) PC-3 | 0.0 |
| Prostate Pool | 0.0 |
| Placenta | 0.0 |
| Uterus Pool | 0.0 |
| Ovarian ca. OVCAR-3 | 0.0 |
| Ovarian ca. SK-OV-3 | 0.0 |
| Ovarian ca. OVCAR-4 | 0.0 |
| Ovarian ca. OVCAR-5 | 0.0 |
| Ovarian ca. IGROV-1 | 0.0 |
| Ovarian ca. OVCAR-8 | 42.6 |
| Ovary | 0.0 |
| Breast ca. MCF-7 | 10.9 |
| Breast ca. MDA-MB-231 | 0.0 |
| Breast ca. BT 549 | 0.0 |
| Breast ca. T47D | 0.0 |
| Breast ca. MDA-N | 0.0 |
| Breast Pool | 0.0 |
| Trachea | 14.3 |
| Lung | 0.0 |
| Fetal Lung | 0.0 |
| Lung ca. NCI-N417 | 0.0 |
| Lung ca. LX-1 | 0.0 |
| Lung ca. NCI-H146 | 0.0 |
| Lung ca. SHP-77 | 0.0 |
| Lung ca. A549 | 0.0 |
| Lung ca. NCI-H526 | 0.0 |
| Lung ca. NCI-H23 | 0.0 |
| Lung ca. NCI-H460 | 0.0 |
| Lung ca. HOP-62 | 0.0 |
| Lung ca. NCI-H522 | 0.0 |
| Liver | 5.6 |
| Fetal Liver | 8.4 |
| Liver ca. HepG2 | 73.7 |
| Kidney Pool | 0.0 |
| Fetal Kidney | 0.0 |
| Renal ca. 786-0 | 0.0 |
| Renal ca. A498 | 0.0 |
| Renal ca. ACHN | 0.0 |
| Renal ca. UO-31 | 0.0 |
| Renal ca. TK-10 | 25.9 |
| Bladder | 100.0 |
| Gastric ca. (liver met.) NCI-N87 | 0.0 |
| Gastric ca. KATO III | 0.0 |
| Colon ca. SW-948 | 0.0 |
| Colon ca. SW480 | 0.0 |
| Colon ca.* (SW480 met) SW620 | 0.0 |
| Colon ca. HT29 | 0.0 |
| Colon ca. HCT-116 | 0.0 |
| Colon ca. CaCo-2 | 0.0 |
| Colon cancer tissue | 1.9 |
| Colon ca. SW1116 | 0.0 |
| Colon ca. Colo-205 | 0.0 |
| Colon ca. SW-48 | 0.0 |
| Colon Pool | 0.0 |
| Small Intestine Pool | 0.0 |
| Stomach Pool | 0.0 |
| Bone Marrow Pool | 0.0 |
| Fetal Heart | 0.0 |
| Heart Pool | 0.0 |
| Lymph Node Pool | 0.0 |
| Fetal Skeletal Muscle | 0.0 |
| Skeletal Muscle Pool | 3.0 |
| Spleen Pool | 0.0 |
| Thymus Pool | 0.0 |
| CNS cancer (glio/astro) U87-MG | 0.0 |
| CNS cancer (glio/astro) U-118-MG | 0.0 |
| CNS cancer (neuro; met) SK-N-AS | 0.0 |
| CNS cancer (astro) SF-539 | 0.0 |
| CNS cancer (astro) SNB-75 | 0.0 |
| CNS cancer (glio) SNB-19 | 0.0 |
| CNS cancer (glio) SF-295 | 3.2 |
| Brain (Amygdala) Pool | 0.0 |
| Brain (cerebellum) | 0.0 |
| Brain (fetal) | 0.0 |
| Brain (Hippocampus) Pool | 0.0 |
| Cerebral Cortex Pool | 0.0 |
| Brain (Substantia nigra) Pool | 0.0 |
| Brain (Thalamus) Pool | 0.0 |
| Brain (whole) | 3.7 |
| Spinal Cord Pool | 7.6 |
| Adrenal Gland | 0.0 |
| Pituitary gland Pool | 0.0 |
| Salivary Gland | 0.0 |
| Thyroid (female) | 0.0 |
| Pancreatic ca. CAPAN2 | 0.0 |
| Pancreas Pool | 33.9 |

[0850] CNS_Neurodegeneration_v1.0 Summary:

[0851] Ag5231 Expression of this gene is low/undetectable in all samples on this panel (CTs>35).

[0852] General_screening_panel_v1.5 Summary:

[0853] Ag5231 Expression of this gene is restricted to a sample derived from a liver cancer cell line and normal bladder (CT=34.2-34.6). Thus, expression of this gene could be used to differentiate between this sample and other samples on this panel and as a marker to detect the presence of liver cancer. Furthermore, therapeutic modulation of the expression or function of this gene may be effective in the treatment of liver cancer.

[0854] Panel 4.1D Summary:

[0855] Ag5231 Expression of this gene is low/undetectable in all samples on this panel (CTs>35).

[0856] P. CG57094-01: PPAR-Gamma.

[0857] Expression of gene CG57094-01 was assessed using the primer-probe sets Ag2012 and Ag383, described in Tables PA and PB. Results of the RTQ-PCR runs are shown in Tables PC, PD, PE, PF, PG, PH, PI, PJ and PK.

TABLE PA

Probe Name Ag2012

| | | | Start | SEQ ID |
|---|---|---|---|---|
| Primers | Sequence | Length | Position | No |
| Forward | 5′-aaggctcagaacagcaggat-3′ | 20 | 478 | 346 |
| Probe | TET-5′-caactcttccacaaggtggcccag-3′-TAMRA | 24 | 502 | 347 |
| Reverse | 5′-gctttgcagatgctgaattc-3′ | 20 | 557 | 348 |

[0858] TABLE PB

Probe Name Ag383

| | | | Start | SEQ ID |
|---|---|---|---|---|
| Primers | Sequence | Length | Position | No |
| Forward | 5′-ggcctctccgtacccttctc-3′ | 20 | 1111 | 349 |
| Probe | TET-5′-accaggatcacgacctccgcagg-3′-TAMRA | 23 | 1139 | 350 |
| Reverse | 5′-agaggctcttggcgcagtt-3′ | 19 | 1168 | 351 |

[0859] TABLE PC
AI comprehensive panel v1.0

| | Rel. Exp. (%) |
|---|---|
| | Ag2012, Run |
| Tissue Name | 228059650 |
| 110967 COPD-F | 3.3 |
| 110980 COPD-F | 1.7 |
| 110968 COPD-M | 3.6 |
| 110977 COPD-M | 3.9 |
| 110989 Emphysema-F | 2.7 |
| 110992 Emphysema-F | 1.2 |
| 110993 Emphysema-F | 2.1 |
| 110994 Emphysema-F | 1.7 |
| 110995 Emphysema-F | 1.9 |
| 110996 Emphysema-F | 0.3 |
| 110997 Asthma-M | 0.8 |
| 111001 Asthma-F | 0.7 |
| 111002 Asthma-F | 1.3 |
| 111003 Atopic Asthma-F | 2.5 |
| 111004 Atopic Asthma-F | 2.5 |
| 111005 Atopic Asthma-F | 1.4 |
| 111006 Atopic Asthma-F | 0.5 |
| 111417 Allergy-M | 0.9 |
| 112347 Allergy-M | 0.1 |
| 112349 Normal Lung-F | 0.0 |
| 112357 Normal Lung-F | 5.5 |
| 112354 Normal Lung-M | 1.1 |
| 112374 Crohns-F | 0.9 |
| 112389 Match Control Crohns-F | 1.9 |
| 112375 Crohns-F | 1.0 |
| 112732 Match Control Crohns-F | 2.4 |
| 112725 Crohns-M | 0.1 |
| 112387 Match Control Crohns-M | 0.7 |
| 112378 Crohns-M | 0.1 |
| 112390 Match Control Crohns-M | 1.9 |
| 112726 Crohns-M | 3.2 |
| 112731 Match Control Crohns-M | 1.1 |
| 112380 Ulcer Col-F | 3.4 |
| 112734 Match Control Ulcer Col-F | 4.6 |
| 112384 Ulcer Col-F | 4.3 |
| 112737 Match Control Ulcer Col-F | 1.4 |
| 112386 Ulcer Col-F | 1.2 |
| 112738 Match Control Ulcer Col-F | 2.2 |
| 112381 Ulcer Col-M | 0.2 |
| 112735 Match Control Ulcer Col-M | 0.4 |
| 112382 Ulcer Col-M | 2.2 |
| 112394 Match Control Ulcer Col-M | 0.3 |
| 112383 Ulcer Col-M | 1.5 |
| 112736 Match Control Ulcer Col-M | 1.7 |
| 112423 Psoriasis-F | 1.8 |
| 112427 Match Control Psoriasis-F | 3.9 |
| 112418 Psoriasis-M | 3.2 |
| 112723 Match Control Psoriasis-M | 5.1 |
| 112419 Psoriasis-M | 3.1 |
| 112424 Match Control Psoriasis-M | 0.9 |
| 112420 Psoriasis-M | 7.2 |
| 112425 Match Control Psoriasis-M | 2.2 |
| 104689 (MF) OA Bone-Backus | 58.2 |
| 104690 (MF) Adj “Normal” Bone-Backus | 72.2 |
| 104691 (MF) OA Synovium-Backus | 29.3 |
| 104692 (BA) OA Cartilage-Backus | 81.8 |
| 104694 (BA) OA Bone-Backus | 13.6 |
| 104695 (BA) Adj “Normal” Bone-Backus | 48.6 |
| 104696 (BA) OA Synovium-Backus | 37.4 |
| 104700 (SS) OA Bone-Backus | 36.9 |
| 104701 (SS) Adj “Normal” Bone-Backus | 42.0 |
| 104702 (SS) OA Synovium-Backus | 100.0 |
| 117093 OA Cartilage Rep7 | 4.2 |
| 112672 OA Bone5 | 4.5 |
| 112673 OA Synovium5 | 1.6 |
| 112674 OA Synovial Fluid cells5 | 2.0 |
| 117100 OA Cartilage Rep14 | 1.9 |
| 112756 OA Bone9 | 1.8 |
| 112757 OA Synovium9 | 4.5 |
| 112758 OA Synovial Fluid Cells9 | 1.7 |
| 117125 RA Cartilage Rep2 | 13.6 |
| 113492 Bone2 RA | 3.0 |
| 113493 Synovium2 RA | 1.0 |
| 113494 Syn Fluid Cells RA | 2.8 |
| 113499 Cartilage4 RA | 2.4 |
| 113500 Bone4 RA | 2.6 |
| 113501 Synovium4 RA | 1.8 |
| 113502 Syn Fluid Cells4 RA | 1.5 |
| 113495 Cartilage3 RA | 1.8 |
| 113496 Bone3 RA | 1.7 |
| 113497 Synovium3 RA | 0.8 |
| 113498 Syn Fluid Cells3 RA | 3.0 |
| 117106 Normal Cartilage Rep20 | 7.3 |
| 113663 Bone3 Normal | 0.2 |
| 113664 Synovium3 Normal | 0.0 |
| 113665 Syn Fluid Cells3 Normal | 0.0 |
| 117107 Normal Cartilage Rep22 | 1.5 |
| 113667 Bone4 Normal | 0.8 |
| 113668 Synovium4 Normal | 0.8 |
| 113669 Syn Fluid Cells4 Normal | 1.7 |

[0860] TABLE PD
Ardais Panel 1.1

| | Rel. Exp. (%) |
|---|---|
| | Ag2012, Run |
| Tissue Name | 315974369 |
| Lung adenocarcinoma SI A | 88.9 |
| Lung adenocarcinoma SI B | 54.3 |
| Lung adenocarcinoma SI B NAT | 18.9 |
| Lung adenocarcinoma SI C | 4.2 |
| Lung adenocarcinoma SI C NAT | 18.2 |
| Lung adenocarcinoma SII A | 22.7 |
| Lung adenocarcinoma SII A NAT | 28.5 |
| Lung adenocarcinoma SII C NAT | 44.8 |
| Lung adenocarcinoma SIII A | 100.0 |
| Lung adenocarcinoma SIII B | 15.1 |
| Lung adenocarcinoma SIII C | 33.9 |
| Lung SCC SI A | 11.4 |
| Lung SCC SI B NAT | 14.3 |
| Lung SCC SI C | 22.2 |
| Lung SCC SI C NAT | 65.5 |
| Lung SCC SI D | 73.2 |
| Lung SCC SI D NAT | 2.2 |
| Lung SCC SII A | 40.3 |
| Lung SCC SII B | 6.1 |
| Lung SCC SIII A | 7.6 |
| Lung SCC SIII A NAT | 4.4 |

[0861] TABLE PE
CNS neurodegeneration v1.0

| | Rel. Exp. (%) |
|---|---|
| | Ag2012, Run |
| Tissue Name | 207794919 |
| AD 1 Hippo | 28.3 |
| AD 2 Hippo | 39.0 |
| AD 3 Hippo | 9.9 |
| AD 4 Hippo | 16.3 |
| AD 5 Hippo | 55.1 |
| AD 6 Hippo | 100.0 |
| Control 2 Hippo | 45.7 |
| Control 4 Hippo | 15.8 |
| Control (Path) 3 Hippo | 18.4 |
| AD 1 Temporal Ctx | 32.1 |
| AD 2 Temporal Ctx | 37.6 |
| AD 3 Temporal Ctx | 12.4 |
| AD 4 Temporal Ctx | 18.7 |
| AD 5 Inf Temporal Ctx | 72.7 |
| AD 5 Sup Temporal Ctx | 62.9 |
| AD 6 Inf Temporal Ctx | 51.4 |
| AD 6 Sup Temporal Ctx | 52.5 |
| Control 1 Temporal Ctx | 8.2 |
| Control 2 Temporal Ctx | 26.2 |
| Control 3 Temporal Ctx | 47.3 |
| Control 3 Temporal Ctx | 10.3 |
| Control (Path) 1 Temporal Ctx | 10.6 |
| Control (Path) 2 Temporal Ctx | 13.1 |
| Control (Path) 3 Temporal Ctx | 29.9 |
| Control (Path) 4 Temporal Ctx | 15.7 |
| AD 1 Occipital Ctx | 17.9 |
| AD 2 Occipital Ctx (Missing) | 0.0 |
| AD 3 Occipital Ctx | 7.9 |
| AD 4 Occipital Ctx | 14.7 |
| AD 5 Occipital Ctx | 28.7 |
| AD 6 Occipital Ctx | 36.9 |
| Control 1 Occipital Ctx | 7.2 |
| Control 2 Occipital Ctx | 32.3 |
| Control 3 Occipital Ctx | 46.0 |
| Control 4 Occipital Ctx | 11.6 |
| Control (Path) 1 Occipital Ctx | 15.8 |
| Control (Path) 2 Occipital Ctx | 5.0 |
| Control (Path) 3 Occipital Ctx | 12.3 |
| Control (Path) 4 Occipital Ctx | 6.5 |
| Control 1 Parietal Ctx | 8.5 |
| Control 2 Parietal Ctx | 57.0 |
| Control 3 Parietal Ctx | 29.7 |
| Control (Path) 1 Parietal Ctx | 8.2 |
| Control (Path) 2 Parietal Ctx | 10.6 |
| Control (Path) 3 Parietal Ctx | 25.9 |
| Control (Path) 4 Parietal Ctx | 18.6 |

[0862] TABLE PF
Panel 1

| | Rel. Exp. (%) |
|---|---|
| | Ag383, Run |
| Tissue Name | 109660410 |
| Endothelial cells | 3.5 |
| Endothelial cells (treated) | 2.9 |
| Pancreas | 9.4 |
| Pancreatic ca. CAPAN 2 | 3.7 |
| Adrenal gland | 18.0 |
| Thyroid | 13.8 |
| Salivary gland | 0.0 |
| Pituitary gland | 2.2 |
| Brain (fetal) | 3.1 |
| Brain (whole) | 4.4 |
| Brain (amygdala) | 17.2 |
| Brain (cerebellum) | 1.6 |
| Brain (hippocampus) | 9.3 |
| Brain (substantia nigra) | 33.2 |
| Brain (thalamus) | 22.7 |
| Brain (hypothalamus) | 5.7 |
| Spinal cord | 21.8 |
| glio/astro U87-MG | 2.2 |
| glio/astro U-118-MG | 4.5 |
| astrocytoma SW1783 | 0.0 |
| neuro*; met SK-N-AS | 2.7 |
| astrocytoma SF-539 | 0.2 |
| astrocytoma SNB-75 | 1.3 |
| glioma SNB-19 | 0.6 |
| glioma U251 | 0.2 |
| glioma SF-295 | 6.2 |
| Heart | 10.7 |
| Skeletal muscle | 18.4 |
| Bone marrow | 11.1 |
| Thymus | 7.3 |
| Spleen | 2.9 |
| Lymph node | 4.3 |
| Colon (ascending) | 1.3 |
| Stomach | 5.4 |
| Small intestine | 7.0 |
| Colon ca. SW480 | 0.4 |
| Colon ca.* SW620 (SW480 met) | 0.1 |
| Colon ca. HT29 | 0.4 |
| Colon ca. HCT-116 | 4.4 |
| Colon ca. CaCo-2 | 1.1 |
| Colon ca. HCT-15 | 11.0 |
| Colon ca. HCC-2998 | 0.0 |
| Gastric ca.* (liver met) NCI-N87 | 4.9 |
| Bladder | 18.8 |
| Trachea | 4.8 |
| Kidney | 7.3 |
| Kidney (fetal) | 11.0 |
| Renal ca. 786-0 | 0.4 |
| Renal ca. A498 | 56.3 |
| Renal ca. RXF 393 | 2.7 |
| Renal ca. ACHN | 1.0 |
| Renal ca. UO-31 | 1.8 |
| Renal ca. TK-10 | 13.4 |
| Liver | 74.7 |
| Liver (fetal) | 27.7 |
| Liver ca. (hepatoblast) HepG2 | 7.4 |
| Lung | 9.9 |
| Lung (fetal) | 1.5 |
| Lung ca. (small cell) LX-1 | 0.4 |
| Lung ca. (small cell) NCI-H69 | 0.5 |
| Lung ca. (s. cell var.) SHP-77 | 0.6 |
| Lung ca. (large cell)NCI-H460 | 20.6 |
| Lung ca. (non-sm. cell) A549 | 3.3 |
| Lung ca. (non-s. cell) NCI-H23 | 7.4 |
| Lung ca. (non-s. cell) HOP-62 | 32.1 |
| Lung ca. (non-s. cl) NCI-H522 | 11.0 |
| Lung ca. (squam.) SW 900 | 3.3 |
| Lung ca. (squam.) NCI-H596 | 0.5 |
| Mammary gland | 30.4 |
| Breast ca.* (pl. ef) MCF-7 | 4.8 |
| Breast ca.* (pl. ef) MDA-MB-231 | 2.2 |
| Breast ca.* (pl. ef) T47D | 9.8 |
| Breast ca. BT-549 | 9.2 |
| Breast ca. MDA-N | 1.3 |
| Ovary | 6.0 |
| Ovarian ca. OVCAR-3 | 1.6 |
| Ovarian ca. OVCAR-4 | 1.9 |
| Ovarian ca. OVCAR-5 | 7.1 |
| Ovarian ca. OVCAR-8 | 1.3 |
| Ovarian ca. IGROV-1 | 0.7 |
| Ovarian ca. (ascites) SK-OV-3 | 2.5 |
| Uterus | 6.3 |
| Placenta | 100.0 |
| Prostate | 13.3 |
| Prostate ca.* (bone met) PC-3 | 7.9 |
| Testis | 14.3 |
| Melanoma Hs688(A).T | 1.4 |
| Melanoma* (met) Hs688(B).T | 5.3 |
| Melanoma UACC-62 | 0.6 |
| Melanoma M14 | 0.9 |
| Melanoma LOX IMVI | 1.0 |
| Melanoma* (met) SK-MEL-5 | 0.0 |
| Melanoma SK-MEL-28 | 1.7 |

[0863] TABLE PG
Panel 1.3D

| | Rel. Exp. (%) | Rel. Exp. (%) |
|---|---|---|
| | g2012, | Ag2012, |
| | Run | Run |
| Tissue Name | 147816240 | 165526994 |
| Liver adenocarcinoma | 26.2 | 37.6 |
| Pancreas | 4.1 | 3.6 |
| Pancreatic ca. CAPAN2 | 3.4 | 4.9 |
| Adrenal gland | 11.2 | 15.7 |
| Thyroid | 13.9 | 11.7 |
| Salivary gland | 2.9 | 5.4 |
| Pituitary gland | 2.7 | 3.5 |
| Brain (fetal) | 4.4 | 12.9 |
| Brain (whole) | 11.1 | 21.0 |
| Brain (amygdala) | 7.3 | 18.7 |
| Brain (cerebellum) | 0.9 | 8.2 |
| Brain (hippocampus) | 21.0 | 31.6 |
| Brain (substantia nigra) | 4.0 | 17.4 |
| Brain (thalamus) | 8.0 | 22.7 |
| Cerebral Cortex | 22.8 | 16.8 |
| Spinal cord | 17.1 | 37.6 |
| glio/astro U87-MG | 2.7 | 2.3 |
| glio/astro U-118-MG | 38.2 | 34.4 |
| astrocytoma SW1783 | 20.2 | 27.9 |
| neuro*; met SK-N-AS | 10.7 | 5.1 |
| astrocytoma SF-539 | 0.3 | 0.6 |
| astrocytoma SNB-75 | 15.7 | 5.2 |
| glioma SNB-19 | 0.0 | 1.0 |
| glioma U251 | 0.1 | 0.8 |
| glioma SF-295 | 4.3 | 2.5 |
| Heart (fetal) | 10.0 | 1.7 |
| Heart | 2.9 | 8.4 |
| Skeletal muscle (fetal) | 44.8 | 5.3 |
| Skeletal muscle | 2.2 | 14.6 |
| Bone marrow | 6.7 | 10.2 |
| Thymus | 3.7 | 3.8 |
| Spleen | 4.9 | 9.6 |
| Lymph node | 6.4 | 17.2 |
| Colorectal | 3.9 | 2.3 |
| Stomach | 5.7 | 7.6 |
| Small intestine | 5.3 | 13.6 |
| Colon ca. SW480 | 1.3 | 0.2 |
| Colon ca.* SW620(SW480 met) | 0.2 | 0.0 |
| Colon ca. HT29 | 0.6 | 0.1 |
| Colon ca. HCT-116 | 2.6 | 4.6 |
| Colon ca. CaCo-2 | 0.8 | 0.5 |
| Colon ca. tissue(ODO3866) | 23.7 | 15.3 |
| Colon ca. HCC-2998 | 3.9 | 1.8 |
| Gastric ca.* (liver met) NCI-N87 | 6.6 | 8.7 |
| Bladder | 6.0 | 11.9 |
| Trachea | 6.1 | 13.1 |
| Kidney | 0.4 | 1.0 |
| Kidney (fetal) | 22.1 | 29.5 |
| Renal ca. 786-0 | 0.1 | 0.0 |
| Renal ca. A498 | 100.0 | 73.7 |
| Renal ca. RXF 393 | 4.8 | 10.9 |
| Renal ca. ACHN | 3.5 | 1.9 |
| Renal ca. UO-31 | 2.0 | 1.8 |
| Renal ca. TK-10 | 3.3 | 4.1 |
| Liver | 8.7 | 31.4 |
| Liver (fetal) | 12.0 | 16.4 |
| Liver ca. (hepatoblast) HepG2 | 5.7 | 4.0 |
| Lung | 18.7 | 28.5 |
| Lung (fetal) | 4.4 | 0.9 |
| Lung ca. (small cell) LX-1 | 0.6 | 0.9 |
| Lung ca. (small cell) NCI-H69 | 0.6 | 0.0 |
| Lung ca. (s. cell var.) SHP-77 | 1.0 | 0.3 |
| Lung ca. (large cell)NCI-H460 | 1.8 | 10.4 |
| Lung ca. (non-sm. cell) A549 | 3.1 | 2.5 |
| Lung ca. (non-s. cell) NCI-H23 | 6.3 | 4.0 |
| Lung ca. (non-s. cell) HOP-62 | 23.7 | 29.1 |
| Lung ca. (non-s. cl) NCI-H522 | 10.8 | 8.2 |
| Lung ca. (squam.) SW900 | 1.2 | 1.2 |
| Lung ca. (squam.) NCI-H596 | 0.0 | 0.3 |
| Mammary gland | 35.1 | 16.8 |
| Breast ca.* (pl. ef) MCF-7 | 2.6 | 4.5 |
| Breast ca.* (pl. ef) MDA-MB-231 | 6.3 | 8.5 |
| Breast ca.* (pl. ef) T47D | 8.0 | 6.8 |
| Breast ca. BT-549 | 40.6 | 43.5 |
| Breast ca. MDA-N | 0.8 | 0.2 |
| Ovary | 14.1 | 4.9 |
| Ovarian ca. OVCAR-3 | 0.4 | 0.9 |
| Ovarian ca. OVCAR-4 | 1.3 | 3.1 |
| Ovarian ca. OVCAR-5 | 6.2 | 5.6 |
| Ovarian ca. OVCAR-8 | 0.3 | 0.0 |
| Ovarian ca. IGROV-1 | 0.0 | 0.2 |
| Ovarian ca.* (ascites) SK-OV-3 | 3.5 | 3.3 |
| Uterus | 4.5 | 6.5 |
| Placenta | 95.9 | 94.6 |
| Prostate | 9.3 | 26.6 |
| Prostate ca.* (bone met)PC-3 | 2.7 | 3.1 |
| Testis | 2.9 | 4.0 |
| Melanoma Hs688(A).T | 4.4 | 2.4 |
| Melanoma* (met) Hs688(B).T | 27.7 | 4.5 |
| Melanoma UACC-62 | 0.2 | 1.2 |
| Melanoma M14 | 0.0 | 3.1 |
| Melanoma LOXIMVI | 1.2 | 0.1 |
| Melanoma* (met) SK-MEL-5 | 0.0 | 0.0 |
| Adipose | 59.9 | 100.0 |

[0864] TABLE PH
Panel 2D

| | Rel. Exp. (%) | Rel. Exp. (%) |
|---|---|---|
| | Ag2012, Run | Ag2012, Run |
| Tissue Name | 155560760 | 164981025 |
| Normal Colon | 1.0 | 1.0 |
| CC Well to Mod Diff | 0.9 | 0.9 |
| (ODO3866) | | |
| CC Margin | 0.6 | 0.3 |
| (ODO3866) | | |
| CC Gr.2 | 0.5 | 0.5 |
| rectosigmoid | | |
| (ODO3868) | | |
| CC Margin | 0.4 | 0.2 |
| (ODO3868) | | |
| CC Mod Diff | 0.1 | 0.1 |
| (ODO3920) | | |
| CC Margin | 0.3 | 0.4 |
| (ODO3920) | | |
| CC Gr.2 ascend colon | 0.2 | 0.3 |
| (ODO3921) | | |
| CC Margin | 0.2 | 0.2 |
| (ODO3921) | | |
| CC from Partial | 1.6 | 1.8 |
| Hepatectomy | | |
| (ODO4309) Mets | | |
| Liver Margin | 1.8 | 2.0 |
| (ODO4309) | | |
| Colon mets to lung | 0.5 | 0.7 |
| (OD04451-01) | | |
| Lung Margin | 0.2 | 0.2 |
| (OD04451-02) | | |
| Normal Prostate | 1.1 | 3.5 |
| 6546-1 | | |
| Prostate Cancer | 0.2 | 0.2 |
| (OD04410) | | |
| Prostate Margin | 0.5 | 0.4 |
| (OD04410) | | |
| Prostate Cancer | 0.3 | 0.3 |
| (OD04720-01) | | |
| Prostate Margin | 0.4 | 0.5 |
| (OD04720-02) | | |
| Normal Lung 061010 | 0.3 | 0.4 |
| Lung Met to Muscle | 1.6 | 1.9 |
| (ODO4286) | | |
| Muscle Margin | 4.2 | 6.0 |
| (ODO4286) | | |
| Lung Malignant | 0.4 | 0.4 |
| Cancer (OD03126) | | |
| Lung Margin | 0.3 | 0.2 |
| (OD03126) | | |
| Lung Cancer | 2.5 | 3.3 |
| (OD04404) | | |
| Lung Margin | 1.7 | 1.7 |
| (OD04404) | | |
| Lung Cancer | 0.3 | 0.2 |
| (OD04565) | | |
| Lung Margin | 0.2 | 0.2 |
| (OD04565) | | |
| Lung Cancer | 0.6 | 0.5 |
| (OD04237-01) | | |
| Lung Margin | 4.6 | 5.2 |
| (OD04237-02) | | |
| Ocular Mel Met to | 0.0 | 0.0 |
| Liver (ODO4310) | | |
| Liver Margin | 2.5 | 3.2 |
| (ODO4310) | | |
| Melanoma Mets to | 0.6 | 0.9 |
| Lung (OD04321) | | |
| Lung Margin | 1.6 | 1.4 |
| (OD04321) | | |
| Normal Kidney | 0.1 | 0.1 |
| Kidney Ca, Nuclear | 0.5 | 0.3 |
| grade 2 (OD04338) | | |
| Kidney Margin | 0.9 | 1.2 |
| (OD04338) | | |
| Kidney Ca Nuclear | 1.2 | 1.2 |
| grade 1/2 (OD04339) | | |
| Kidney Margin | 1.3 | 1.0 |
| (OD04339) | | |
| Kidney Ca, Clear cell | 100.0 | 100.0 |
| type (OD04340) | | |
| Kidney Margin | 0.9 | 1.1 |
| (OD04340) | | |
| Kidney Ca, Nuclear | 8.1 | 9.3 |
| grade 3 (OD04348) | | |
| Kidney Margin | 0.6 | 0.8 |
| (OD04348) | | |
| Kidney Cancer | 32.3 | 53.6 |
| (OD04622-01) | | |
| Kidney Margin | 0.2 | 0.3 |
| (OD04622-03) | | |
| Kidney Cancer | 0.2 | 0.2 |
| (OD04450-01) | | |
| Kidney Margin | 0.2 | 0.3 |
| (OD04450-03) | | |
| Kidney Cancer | 0.2 | 0.2 |
| 8120607 | | |
| Kidney Margin | 0.1 | 0.1 |
| 8120608 | | |
| Kidney Cancer | 0.1 | 0.3 |
| 8120613 | | |
| Kidney Margin | 0.9 | 1.0 |
| 8120614 | | |
| Kidney Cancer | 24.7 | 26.8 |
| 9010320 | | |
| Kidney Margin | 1.1 | 1.1 |
| 9010321 | | |
| Normal Uterus | 0.1 | 0.1 |
| Uterus Cancer | 0.5 | 0.4 |
| 064011 | | |
| Normal Thyroid | 1.1 | 0.6 |
| Thyroid Cancer | 1.4 | 2.0 |
| 064010 | | |
| Thyroid Cancer | 0.2 | 0.2 |
| A302152 | | |
| Thyroid Margin | 0.5 | 0.3 |
| A302153 | | |
| Normal Breast | 0.9 | 0.9 |
| Breast Cancer | 0.2 | 0.2 |
| (OD04566) | | |
| Breast Cancer | 0.4 | 0.6 |
| (OD04590-01) | | |
| Breast Cancer | 2.0 | 1.7 |
| Mets | | |
| (OD04590-03) | | |
| Breast Cancer | 0.5 | 0.2 |
| Metastasis | | |
| (OD04655-05) | | |
| Breast Cancer | 0.2 | 0.2 |
| 064006 | | |
| Breast Cancer | 0.7 | 0.6 |
| 1024 | | |
| Breast Cancer | 0.5 | 0.4 |
| 9100266 | | |
| Breast Margin | 0.5 | 0.6 |
| 9100265 | | |
| Breast Cancer | 0.4 | 0.4 |
| A209073 | | |
| Breast Margin | 0.3 | 0.3 |
| A209073 | | |
| Normal Liver | 1.8 | 2.8 |
| Liver Cancer | 4.2 | 3.4 |
| 064003 | | |
| Liver Cancer 1025 | 3.6 | 3.8 |
| Liver Cancer 1026 | 2.0 | 2.8 |
| Liver Cancer | 7.1 | 4.8 |
| 6004-T | | |
| Liver Tissue | 0.9 | 1.1 |
| 6004-N | | |
| Liver Cancer | 2.8 | 2.3 |
| 6005-T | | |
| Liver Tissue | 1.4 | 1.7 |
| 6005-N | | |
| Normal Bladder | 2.3 | 1.8 |
| Bladder Cancer | 0.7 | 0.6 |
| 1023 | | |
| Bladder Cancer | 0.4 | 0.4 |
| A302173 | | |
| Bladder Cancer | 2.9 | 2.6 |
| (OD04718-01) | | |
| Bladder Normal | 2.7 | 2.9 |
| Adjacent | | |
| (OD04718-03) | | |
| Normal Ovary | 0.4 | 0.3 |
| Ovarian Cancer | 0.3 | 0.3 |
| 064008 | | |
| Ovarian Cancer | 4.1 | 6.0 |
| (OD04768-07) | | |
| Ovary Margin | 3.1 | 2.6 |
| (OD04768-08) | | |
| Normal Stomach | 0.3 | 0.3 |
| Gastric Cancer | 0.1 | 0.1 |
| 9060358 | | |
| Stomach Margin | 0.1 | 0.2 |
| 9060359 | | |
| Gastric Cancer | 0.2 | 0.3 |
| 9060395 | | |
| Stomach Margin | 0.3 | 0.3 |
| 9060394 | | |
| Gastric Cancer | 0.1 | 0.2 |
| 9060397 | | |
| Stomach Margin | 0.2 | 0.2 |
| 9060396 | | |
| Gastric Cancer | 0.4 | 0.6 |
| 064005 | | |

[0865] TABLE PI
Panel 3D

| | Rel. Exp. (%) | Rel. Exp. (%) |
|---|---|---|
| | Ag2012, Run | Ag2012, Run |
| Tissue Name | 155560795 | 164165421 |
| Daoy- | 0.1 | 0.3 |
| Medulloblastoma | | |
| TE671- | 3.2 | 2.8 |
| Medulloblastoma | | |
| D283 Med- | 0.4 | 0.5 |
| Medulloblastoma | | |
| PFSK-1- Primitive | 3.1 | 2.7 |
| Neuroectodermal | | |
| XF-498- CNS | 3.1 | 2.5 |
| SNB-78- Glioma | 7.6 | 4.0 |
| SF-268- Glioblastoma | 2.9 | 1.9 |
| T98G- Glioblastoma | 0.2 | 0.6 |
| SK-N-SH- | 11.7 | 11.3 |
| Neuroblastoma | | |
| (metastasis) | | |
| SF-295- Glioblastoma | 1.4 | 0.9 |
| Cerebellum | 5.5 | 5.3 |
| Cerebellum | 3.3 | 3.0 |
| NCI-H292- | 8.2 | 7.9 |
| Mucoepidermoid lung | | |
| carcinoma | | |
| DMS-114- Small cell | 1.1 | 2.3 |
| lung cancer | | |
| DMS-79- Small cell | 8.5 | 9.7 |
| lung cancer | | |
| NCI-H146- Small cell | 0.6 | 1.0 |
| lung cancer | | |
| NCI-H526- Small cell | 0.8 | 1.3 |
| lung cancer | | |
| NCI-N417- Small cell | 0.0 | 0.4 |
| lung cancer | | |
| NCI-H82- Small cell | 0.3 | 0.0 |
| lung cancer | | |
| NCI-H157- Squamous | 0.2 | 0.9 |
| cell lung cancer | | |
| (metastasis) | | |
| NCI-H1155- Large | 0.5 | 0.5 |
| cell lung cancer | | |
| NCI-H1299- Large | 37.9 | 36.1 |
| cell lung cancer | | |
| NCI-H727- Lung | 0.7 | 1.0 |
| carcinoid | | |
| NCI-UMC-11- Lung | 0.7 | 0.4 |
| carcinoid | | |
| LX-1- Small cell lung | 0.0 | 0.3 |
| cancer | | |
| Colo-205- Colon | 0.8 | 0.4 |
| cancer | | |
| KM12- Colon cancer | 1.0 | 1.2 |
| KM20L2- Colon | 0.0 | 0.0 |
| cancer | | |
| NCI-H716- Colon | 6.1 | 8.4 |
| cancer | | |
| SW-48- Colon | 0.3 | 1.2 |
| adenocarcinoma | | |
| SW1116- Colon | 0.4 | 0.5 |
| adenocarcinoma | | |
| LS 174T- Colon | 0.2 | 0.4 |
| adenocarcinoma | | |
| SW-948- Colon | 0.0 | 0.2 |
| adenocarcinoma | | |
| SW-480- Colon | 0.5 | 0.2 |
| adenocarcinoma | | |
| NCI-SNU-5- Gastric | 1.5 | 1.3 |
| carcinoma | | |
| KATO III- Gastric | 1.2 | 5.9 |
| carcinoma | | |
| NCI-SNU-16- Gastric | 97.3 | 95.9 |
| carcinoma | | |
| NCI-SNU-1- Gastric | 1.4 | 1.0 |
| carcinoma | | |
| RF-1- Gastric | 0.0 | 0.3 |
| adenocarcinoma | | |
| RF-48- Gastric | 0.0 | 0.4 |
| adenocarcinoma | | |
| MKN-45- Gastric | 3.4 | 4.4 |
| carcinoma | | |
| NCI-N87- Gastric | 0.3 | 0.9 |
| carcinoma | | |
| OVCAR-5- Ovarian | 2.0 | 1.5 |
| carcinoma | | |
| RL95-2- Uterine | 1.7 | 2.7 |
| carcinoma | | |
| HelaS3- Cervical | 1.2 | 0.5 |
| adenocarcinoma | | |
| Ca Ski- Cervical | 5.5 | 6.2 |
| epidermoid carcinoma | | |
| (metastasis) | | |
| ES-2- Ovarian clear | 1.5 | 1.0 |
| cell carcinoma | | |
| Ramos- Stimulated | 0.0 | 0.0 |
| with PMA/ionomycin | | |
| 6 h | | |
| Ramos- Stimulated | 0.0 | 0.2 |
| with PMA/ionomycin | | |
| 14 h | | |
| MEG-01- Chronic | 0.8 | 1.2 |
| myelogenous leukemia | | |
| (megokaryoblast) | | |
| Raji- Burkitt's | 0.2 | 0.4 |
| lymphoma | | |
| Daudi- Burkitt's | 0.3 | 0.4 |
| lymphoma | | |
| U266- B-cell | 1.1 | 0.6 |
| plasmacytoma | | |
| CA46- Burkitt's | 0.0 | 0.4 |
| lymphoma | | |
| RL- non-Hodgkin's | 0.0 | 0.2 |
| B-cell lymphoma | | |
| JM1- pre-B-cell | 0.2 | 0.6 |
| lymphoma | | |
| Jurkat- T cell leukemia | 1.2 | 0.4 |
| TF-1- Erythroleukemia | 0.3 | 0.5 |
| HUT 78- T-cell | 0.6 | 1.6 |
| lymphoma | | |
| U937- Histiocytic | 0.4 | 0.4 |
| lymphoma | | |
| KU-812- Myelogenous | 0.5 | 0.4 |
| leukemia | | |
| 769-P- Clear cell renal | 3.1 | 2.2 |
| carcinoma | | |
| Caki-2- Clear cell renal | 35.8 | 33.7 |
| carcinoma | | |
| SW 839- Clear cell | 24.5 | 40.6 |
| renal carcinoma | | |
| G401- Wilms' tumor | 0.9 | 0.9 |
| Hs766T- Pancreatic | 18.3 | 25.9 |
| carcinoma (LN | | |
| metastasis) | | |
| CAPAN-1- Pancreatic | 2.6 | 2.5 |
| adenocarcinoma (liver | | |
| metastasis) | | |
| SU86.86- Pancreatic | 0.2 | 0.2 |
| carcinoma (liver | | |
| metastasis) | | |
| BxPC-3- Pancreatic | 5.8 | 5.4 |
| adenocarcinoma | | |
| HPAC- Pancreatic | 1.4 | 3.0 |
| adenocarcinoma | | |
| MIA PaCa-2- | 2.5 | 4.9 |
| Pancreatic carcinoma | | |
| CFPAC-1- Pancreatic | 3.0 | 2.3 |
| ductal adenocarcinoma | | |
| PANC-1- Pancreatic | 100.0 | 100.0 |
| epithelioid ductal | | |
| carcinoma | | |
| T24- Bladder carcinma | 49.0 | 67.4 |
| (transitional cell) | | |
| 5637- Bladder | 0.4 | 0.2 |
| carcinoma | | |
| HT-1197- Bladder | 5.2 | 7.6 |
| carcinoma | | |
| UM-UC-3- Bladder | 62.0 | 81.2 |
| carcinma (transitional cell) | | |
| A204- | 0.6 | 2.0 |
| Rhabdomyosarcoma | | |
| HT-1080- | 0.1 | 0.4 |
| Fibrosarcoma | | |
| MG-63- Osteosarcoma | 18.7 | 13.1 |
| SK-LMS-1- | 9.3 | 9.1 |
| Leiomyosarcoma | | |
| (vulva) | | |
| SJRH30- | 0.4 | 0.6 |
| Rhabdomyosarcoma | | |
| (met to bone marrow) | | |
| A431- Epidermoid | 0.4 | 0.9 |
| carcinoma | | |
| WM266-4- Melanoma | 18.2 | 25.2 |
| DU 145- Prostate | 0.3 | 0.1 |
| carcinoma (brain | | |
| metastasis) | | |
| MDA-MB-468- Breast | 0.0 | 0.2 |
| adenocarcinoma | | |
| SCC-4- Squamous cell | 0.0 | 0.2 |
| carcinoma of tongue | | |
| SCC-9- Squamous cell | 0.7 | 0.7 |
| carcinoma of tongue | | |
| SCC-15- Squamous | 0.0 | 0.0 |
| cell carcinoma of | | |
| tongue | | |
| CAL 27- Squamous | 0.0 | 0.5 |
| cell carcinoma of | | |
| tongue | | |

[0866] TABLE PJ
Panel 4D

| | Rel. Exp. (%) | Rel. Exp. (%) |
|---|---|---|
| | Ag2012, Run | Ag2012, Run |
| Tissue Name | 155560840 | 163582094 |
| Secondary Th1 act | 0.2 | 0.1 |
| Secondary Th2 act | 0.3 | 0.2 |
| Secondary Tr1 act | 0.6 | 0.1 |
| Secondary Th1 rest | 0.1 | 0.1 |
| Secondary Th2 rest | 0.0 | 0.0 |
| Secondary Tr1 rest | 0.1 | 0.1 |
| Primary Th1 act | 0.0 | 0.1 |
| Primary Th2 act | 0.0 | 0.1 |
| Primary Tr1 act | 0.1 | 0.1 |
| Primary Th1 rest | 0.1 | 0.1 |
| Primary Th2 rest | 0.1 | 0.1 |
| Primary Tr1 rest | 0.1 | 0.1 |
| CD45RA CD4 | 0.1 | 0.1 |
| lymphocyte act | | |
| CD45RO CD4 | 0.1 | 0.1 |
| lymphocyte act | | |
| CD8 lymphocyte act | 0.1 | 0.1 |
| Secondary CD8 | 0.3 | 0.1 |
| lymphocyte rest | | |
| Secondary CD8 | 0.2 | 0.2 |
| lymphocyte act | | |
| CD4 lymphocyte none | 0.0 | 0.0 |
| 2ry | 0.1 | 0.0 |
| Th1/Th2/Tr1_anti-CD95 | | |
| CH11 | | |
| LAK cells rest | 0.1 | 0.1 |
| LAK cells IL-2 | 0.5 | 0.1 |
| LAK cells IL-2 + IL-12 | 0.1 | 0.1 |
| LAK cells IL-2 + IFN | 0.1 | 0.1 |
| gamma | | |
| LAK cells IL-2 + IL-18 | 0.2 | 0.1 |
| LAK cells | 35.8 | 18.3 |
| PMA/ionomycin | | |
| NK Cells IL-2 rest | 0.1 | 0.1 |
| Two Way MLR 3 day | 0.2 | 0.1 |
| Two Way MLR 5 day | 0.0 | 0.0 |
| Two Way MLR 7 day | 0.1 | 0.1 |
| PBMC rest | 0.1 | 0.1 |
| PBMC PWM | 0.3 | 0.1 |
| PBMC PHA-L | 1.8 | 1.2 |
| Ramos (B cell) none | 0.0 | 0.0 |
| Ramos (B cell) | 0.1 | 0.2 |
| ionomycin | | |
| B lymphocytes PWM | 0.6 | 0.5 |
| B lymphocytes CD40L | 0.3 | 0.1 |
| and IL-4 | | |
| EOL-1 dbcAMP | 0.3 | 0.0 |
| EOL-1 dbcAMP | 0.3 | 0.2 |
| PMA/ionomycin | | |
| Dendritic cells none | 0.4 | 0.3 |
| Dendritic cells LPS | 0.8 | 0.9 |
| Dendritic cells | 0.3 | 0.3 |
| anti-CD40 | | |
| Monocytes rest | 0.2 | 0.1 |
| Monocytes LPS | 0.1 | 0.1 |
| Macrophages rest | 0.2 | 0.2 |
| Macrophages LPS | 0.5 | 0.3 |
| HUVEC none | 1.6 | 0.5 |
| HUVEC starved | 1.0 | 0.6 |
| HUVEC IL-1beta | 0.4 | 0.2 |
| HUVEC IFN gamma | 0.8 | 0.5 |
| HUVEC TNF alpha + | 0.5 | 0.6 |
| IFN gamma | | |
| HUVEC TNF alpha + | 3.0 | 1.9 |
| IL4 | | |
| HUVEC IL-11 | 1.2 | 0.7 |
| Lung Microvascular | 9.6 | 4.3 |
| EC none | | |
| Lung Microvascular | 11.0 | 5.8 |
| EC TNFalpha + | | |
| IL-1beta | | |
| Microvascular | 16.5 | 9.7 |
| Dermal EC none | | |
| Microsvasular | 9.9 | 6.7 |
| Dermal EC | | |
| TNFalpha + IL-1beta | | |
| Bronchial epithelium | 3.7 | 4.2 |
| TNFalpha + IL1beta | | |
| Small airway | 18.6 | 13.5 |
| epithelium none | | |
| Small airway | 100.0 | 100.0 |
| epithelium TNFalpha + | | |
| IL-1beta | | |
| Coronery artery SMC | 6.7 | 7.9 |
| rest | | |
| Coronery artery SMC | 2.1 | 2.0 |
| TNFalpha + IL-1beta | | |
| Astrocytes rest | 5.3 | 5.1 |
| Astrocytes TNFalpha + | 8.1 | 5.6 |
| IL-1beta | | |
| KU-812 (Basophil) | 0.0 | 0.1 |
| rest | | |
| KU-812 (Basophil) | 0.8 | 0.7 |
| PMA/ionomycin | | |
| CCD1106 | 1.8 | 1.3 |
| (Keratinocytes) none | | |
| CCD1106 | 2.1 | 2.0 |
| (Keratinocytes) | | |
| TNFalpha + IL-1beta | | |
| Liver cirrhosis | 7.3 | 6.9 |
| Lupus kidney | 0.1 | 0.1 |
| NCI-H292 none | 0.2 | 0.3 |
| NCI-H292 IL-4 | 1.0 | 0.8 |
| NCI-H292 IL-9 | 0.5 | 0.5 |
| NCI-H292 IL-13 | 0.5 | 0.4 |
| NCI-H292 IFN | 0.4 | 0.6 |
| gamma | | |
| HPAEC none | 4.8 | 3.9 |
| HPAEC TNF alpha + | 6.6 | 2.8 |
| IL-1 beta | | |
| Lung fibroblast none | 2.0 | 2.0 |
| Lung fibroblast TNF | 0.7 | 0.3 |
| alpha + IL-1 beta | | |
| Lung fibroblast IL-4 | 14.8 | 10.2 |
| Lung fibroblast IL-9 | 4.1 | 4.5 |
| Lung fibroblast IL-13 | 7.0 | 6.5 |
| Lung fibroblast IFN | 13.0 | 10.5 |
| gamma | | |
| Dermal fibroblast | 2.2 | 1.4 |
| CCD1070 rest | | |
| Dermal fibroblast | 1.0 | 1.3 |
| CCD1070 TNF alpha | | |
| Dermal fibroblast | 0.8 | 1.0 |
| CCD1070 IL-1 beta | | |
| Dermal fibroblast | 1.1 | 1.2 |
| IFN gamma | | |
| Dermal fibroblast | 7.9 | 7.5 |
| IL-4 | | |
| IBD Colitis 2 | 0.8 | 0.7 |
| IBD Crohn's | 2.4 | 2.4 |
| Colon | 3.8 | 2.1 |
| Lung | 4.6 | 6.9 |
| Thymus | 0.8 | 0.5 |
| Kidney | 3.6 | 2.0 |

[0867] TABLE PK
Panel 5 Islet

| | Rel. Exp. (%) |
|---|---|
| | Ag2012 Run |
| Tissue Name | 254275032 |
| 97457_Patient-02go_adipose | 8.5 |
| 97476_Patient-07sk_skeletal muscle | 5.7 |
| 97477_Patient-07ut_uterus | 1.7 |
| 97478_Patient-07pl_placenta | 50.7 |
| 99167_Bayer Patient 1 | 47.6 |
| 97482_Patient-08ut_uterus | 1.8 |
| 97483_Patient-08pl_placenta | 32.8 |
| 97486_Patient-09sk_skeletal muscle | 3.5 |
| 97487_Patient-09ut_uterus | 0.5 |
| 97488_Patient-09pl_placenta | 29.7 |
| 97492_Patient-10ut_uterus | 2.8 |
| 97493_Patient-1Opl_placenta | 74.2 |
| 97495_Patient-11go_adipose | 7.9 |
| 97496_Patient-11sk_skeletal muscle | 4.8 |
| 97497_Patient-11ut_uterus | 2.0 |
| 97498_Patient-11pl_placenta | 20.2 |
| 97500_Patient-12go_adipose | 16.4 |
| 9750l_Patient-12sk_skeletal muscle | 34.6 |
| 97502_Patient-12ut_uterus | 2.3 |
| 97503_Patient-12pl_placenta | 27.9 |
| 94721_Donor 2 U - A_Mesenchymal Stem Cells | 2.0 |
| 94722_Donor 2 U - B_Mesenchymal Stem Cells | 2.1 |
| 94723_Donor 2 U - C_Mesenchymal Stem Cells | 1.7 |
| 94709_Donor 2 AM - A_adipose | 21.6 |
| 94710_Donor 2 AM - B_adipose | 18.0 |
| 94711_Donor 2 AM - C_adipose | 13.9 |
| 94712_Donor 2 AD - A_adipose | 6.0 |
| 94713_Donor 2 AD - B_adipose | 9.2 |
| 94714_Donor 2 AD - C_adipose | 22.5 |
| 94742_Donor 3 U - A_Mesenchymal Stem Cells | 2.0 |
| 94743_Donor 3 U - B_Mesenchymal Stem Cells | 5.1 |
| 94730_Donor 3 AM - A_adipose | 100.0 |
| 94731_Donor 3 AM - B_adipose | 64.2 |
| 94732_Donor 3 AM - C_adipose | 49.3 |
| 94733_Donor 3 AD - A_adipose | 14.7 |
| 94734_Donor 3 AD - B_adipose | 9.4 |
| 94735_Donor 3 AD - C_adipose | 19.5 |
| 77138_Liver_HepG2untreated | 6.9 |
| 73556_Heart_Cardiac stromal cells (primary) | 4.4 |
| 81735_Small Intestine | 4.2 |
| 72409_Kidney_Proximal Convoluted Tubule | 5.1 |
| 82685_Small intestine_Duodenum | 5.9 |
| 90650_Adrenal_Adrenocortical adenoma | 2.6 |
| 72410_Kidney_HRCE | 49.0 |
| 72411_Kidney_HRE | 11.3 |
| 73139_Uterus_Uterine smooth muscle cells | 1.6 |

[0868] AI_Comprehensive Panel_v1.0 Summary:

[0869] Ag2012 This gene shows a wide spread expression in this panel, with moderate to low expression in samples derived from normal and orthoarthitis/rheumatoid arthritis bone and adjacent bone, cartilage, synovium and synovial fluid samples, from normal lung, COPD lung, emphysema, atopic asthma, asthma, allergy, Crohn's disease (normal matched control and diseased), ulcerative colitis(normal matched control and diseased), and psoriasis (normal matched control and diseased). This gene appears to be upregulated in samples of bone, cartilage and synovium from patients with osteorarthritis when compared to expression in corresponding normal samples. Thus, therapeutic modulation of the expression or function of this gene may be effective in the treatment of oseoarthritis.

[0870] Ardais Panel 1.1 Summary:

[0871] Ag2012 Highest expression of this gene is detected in lung cancer (358) sample (CT=26.6). This gene is expressed both in normal and cancer lung tissues. Higher expression of this gene is associated with the cancer as compared to normal lung. Therefore, expression of this gene may be used as a diagnostic marker for lung cancer and also, therapeutic modulation of this gene through the use of antibodies may be useful in the treatment of lung cancer.

[0872] CNS_Neurodegeneration_v1.0 Summary:

[0873] Ag2012 This gene is present in the brain as evidenced by expression in this panel and panel 1.3D. No apparent association with Alzheimer's disease is seen. However, Thus, therapeutic modulation of the expression or function of this gene may be effective in the treatment of neurologic diseases.

[0874] Panel 1 Summary:

[0875] Ag383 Highest expression of this gene is detected in placenta (CT=21.7). This gene shows a widespread expression in this panel, which corelates with the expression seen in panel 1.3D. Please see panel 1.3D for further discussion.

[0876] Panel 1.3D Summary:

[0877] Ag2012 Two experiments with same probe and primer sets are in good agreement. Highest expression of this gene is seen in a renal cancer cell line and adipose tissue (CTs=28.7-29). Significant expression is also seen in breast, brain, colon, liver, renal and melanoma cancer cell lines. Thus, expression of this gene could be used to differentiate between the lung cancer cell line and other samples on this panel and as a marker for these cancers. This gene is identical to angiopoeitin related protein 4 (ARP4), which is know to be angiogenic [1]. Since angiogenesis is essential for the growth and metastasis of solid tumors, therapeutic modulation of the expression or function of this ARP protein encoded by this gene, through the use of protein therapeutics or antibodies, may be effective in the treatment of melanoma, brain, colon, renal and liver cancers.

[0878] Among tissues with metabolic function, this gene is expressed most highly in adipose with moderate levels in pituitary, adipose, adrenal gland, pancreas, thyroid, and adult and fetal skeletal muscle, heart, and liver. This widespread expression among these tissues suggests that this gene product may play a role in normal neuroendocrine and metabolic and that disregulated expression of this gene may contribute to neuroendocrine disorders or metabolic diseases, such as obesity and diabetes. ARP4 has been widely studied in the context of adipose biology [2]. The mouse gene, known as fasting-induced adipose factor, is predominantly expressed in adipose tissue and is strongly upregulated by fasting in white adipose tissue and liver[3]. The N-terminal and C-terminal portions contain the characteristic coiled-coil domains and fibrinogen-like domains that are conserved in angiopoietins. In human and mouse tissues, it is specifically expressed in the liver and they are mainly present in the hepatocytes [4]. Recombinant protein expressed in COS-7 cells is secreted and glycosylated. Furthermore, Angiopoietin-2 has been implicated in adipose tissue regression [5]. Since this molecule is an angiopoietin homolog that is highly expressed in adipose, this molecule may also play a role in initiation of apoptosis in adipose. Thus, therapeutic modulation of the expression or function of this gene may be effective in the treatment of obesity.

[0879] In addition, expression of this gene is higher in fetal kidney (CTs=30-31) when compared to expression in adult kidney (CTs35-37). Thus, expression of this gene could be used to differentiate between adult and fetal kidney.

[0880] Furthermore, expression of this gene in fetal kidney and renal cell carcinoma-derived cell lines but not in adult kidney, suggests that it may be involved in kidney development and organogenesis and also, in kidney tumorgenesis.

[0881] References:

[0882] 1. Kim I, Kim H G, Kim H, Kim H H, Park S K, Uhm C S, Lee Z H, Koh G Y. Hepatic expression, synthesis and secretion of a novel fibrinogen/angiopoietin-related protein that prevents endothelial-cell apoptosis. Biochem J Mar. 15, 2000;346 Pt 3:603-10. PMID: 10698685.

[0883] 2. Yoon J C, Chickering T W, Rosen E D, Dussault B, Qin Y, Soukas A, Friedman J M, Holmes WE, Spiegelman B M. Peroxisome proliferator-activated receptor gamma target gene encoding a novel angiopoietin-related protein associated with adipose differentiation. Mol Cell Biol Jul. 20, 2000 (14):5343-9. PMID: 10866690

[0884] 3. Kersten S, Mandard S, Tan N S, Escher P, Metzger D, Chambon P, Gonzalez F J, Desvergne B, Wahli W. Characterization of the fasting-induced adipose factor FIAF, a novel peroxisome proliferator-activated receptor target gene. J Biol Chem Sep. 15, 2000;275(37):28488-93. PMID: 10862772.

[0885] 4. Reinmuth N, Stoeltzing O, Liu W, Ahmad S A, Jung Y D, Fan F, Parikh A, Ellis L M.Endothelial survival factors as targets for antineoplastic therapy. Cancer J 2001 Nov-Dec;7 Suppl 3:S109-19. PMID: 11779081

[0886] 5. Cohen B, Barkan D, Levy Y, Goldberg I, Fridman E, Kopolovic J, Rubinstein M. Leptin induces angiopoietin-2 expression in adipose tissues. PMID: 11152449

[0887] Panel 2D Summary:

[0888] Ag2012 Two experiments with two different probe and primer sets produce results that are in excellent agreement, with highest expression in kidney cancer (CTs=22-24). Thus, expression of this gene could be used to differentiate between this sample and other samples on this panel and as a marker to detect the presence of kidney cancer. Furthermore, therapeutic modulation of the expression or function of ARP encoded by this gene through the use of protein therapeutics or antibodies, may be effective in the treatment of kidney cancer.

[0889] Panel 3D Summary:

[0890] Ag2012 Two experiments with two different probe and primer sets produce results that are in excellent agreement, with highest expression in gastric, bladder, renal, pancreatic, and lung cancer cell lines. Thus, expression of this gene could be used to differentiate between these samples and other samples on this panel.

[0891] Panel 4D Summary:

[0892] Ag2012 Two experiments with two different probe and primer sets produce results that are in excellent agreement, with highest expression in small airway epithelium treated with TNF-alpha and IL-1beta (CTs=24.4). Thus, expression of this gene could be used as a marker of activated epithelium. Interestingly, expression of this gene is upregulated upon immune-stimulation of the airway epithelial cells and lung fibroblasts by cytokines as compared to corresponding resting cells. Furthermore, expression of this gene in LAK cells treated with PMA/ionomycin is also upregulated relative to the expression in resting cells. These data indicate that ARP plays a role in inflammation related to the above cells of the pulmonary system and is thereby implicated as a target for therapeutic intervention by protein and antibody therapeutics, as well as, small molecule pharmaceuticals. A wholly human antibody directed at ARP, for example, may diminish the symptoms of patients with allergy, asthma or emphysema.

[0893] In addtion, the gene is expressed at significant levels in a wide range of cell types of significance in the immune response in health and disease. These cells include members of the T-cell, B-cell, endothelial cell, macrophage/monocyte, and peripheral blood mononuclear cell family, as well as epithelial and fibroblast cell types from lung and skin, and normal tissues represented by colon, lung, thymus and kidney. Therefore, modulation of the gene product with a functional therapeutic may lead to the alteration of functions associated with these cell types and lead to improvement of the symptoms of patients suffering from autoimmune and inflammatory diseases such as asthma, allergies, inflammatory bowel disease, lupus erythematosus, psoriasis, rheumatoid arthritis, and osteoarthritis.

[0894] Panel 5 Islet Summary:

[0895] Ag2012 Highest expression of this gene is detected in midway differentiated adipose tissue. This gene shows a wide spread expression in this panel, withmoderate expressions in adipose, placenta, skeletal muscle, uterus, kidney and small intestine. Interestingly, higher levels of expression of this gene is seen in midway differentiated adipose as compared to undifferentiated and differentiated adipose. Angiopoietin-related protein is shown to be associated with adipose differentiation. Therefore, therapeutic modulation of this gene or ARP encoded by this gene may be useful in the treatment of obesity and diabetes.

### Example D

### Identification of Single Nucleotide Polymorphisms in NOVX Nucleic Acid Sequences

[0896] Variant sequences are also included in this application. A variant sequence can include a single nucleotide polymorphism (SNP). A SNP can, in some instances, be referred to as a “cSNP” to denote that the nucleotide sequence containing the SNP originates as a cDNA. A SNP can arise in several ways. For example, a SNP may be due to a substitution of one nucleotide for another at the polymorphic site. Such a substitution can be either a transition or a transversion. A SNP can also arise from a deletion of a nucleotide or an insertion of a nucleotide, relative to a reference allele. In this case, the polymorphic site is a site at which one allele bears a gap with respect to a particular nucleotide in another allele. SNPs occurring within genes may result in an alteration of the amino acid encoded by the gene at the position of the SNP. Intragenic SNPs may also be silent, when a codon including a SNP encodes the same amino acid as a result of the redundancy of the genetic code. SNPs occurring outside the region of a gene, or in an intron within a gene, do not result in changes in any amino acid sequence of a protein but may result in altered regulation of the expression pattern. Examples include alteration in temporal expression, physiological response regulation, cell type expression regulation, intensity of expression, and stability of transcribed message.

[0897] SeqCalling assemblies produced by the exon linking process were selected and extended using the following criteria. Genomic clones having regions with 98% identity to all or part of the initial or extended sequence were identified by BLASTN searches using the relevant sequence to query human genomic databases. The genomic clones that resulted were selected for further analysis because this identity indicates that these clones contain the genomic locus for these SeqCalling assemblies. These sequences were analyzed for putative coding regions as well as for similarity to the known DNA and protein sequences. Programs used for these analyses include Grail, Genscan, BLAST, HMMER, FASTA, Hybrid and other relevant programs.

[0898] Some additional genomic regions may have also been identified because selected SeqCalling assemblies map to those regions. Such SeqCalling sequences may have overlapped with regions defined by homology or exon prediction. They may also be included because the location of the fragment was in the vicinity of genomic regions identified by similarity or exon prediction that had been included in the original predicted sequence. The sequence so identified was manually assembled and then may have been extended using one or more additional sequences taken from CuraGen Corporation's human SeqCalling database. SeqCalling fragments suitable for inclusion were identified by the CuraTools™ program SeqExtend or by identifying SeqCalling fragments mapping to the appropriate regions of the genomic clones analyzed.

[0899] The regions defined by the procedures described above were then manually integrated and corrected for apparent inconsistencies that may have arisen, for example, from miscalled bases in the original fragments or from discrepancies between predicted exon junctions, EST locations and regions of sequence similarity, to derive the final sequence disclosed herein. When necessary, the process to identify and analyze SeqCalling assemblies and genomic clones was reiterated to derive the full length sequence (Alderbom et al., Determination of Single Nucleotide Polymorphisms by Real-time Pyrophosphate DNA Sequencing. Genome Research. 10 (8) 1249-1265, 2000).

[0900] Variants are reported individually but any combination of all or a select subset of variants are also included as contemplated NOVX embodiments of the invention.

TABLE D1
Variants of nucleotide sequence CG52113-01

| | Nucleotides | | | Amino Acids | | |
|---|---|---|---|---|---|---|
| Variant | Position | Initial | Modified | Position | Initial | Modified |
| 13378348 | 245 | G | C | 50 | Gln | His |
| 13381469 | 279 | T | C | 62 | Cys | Arg |
| 13373863 | 552 | G | A | 153 | Val | Ile |
| 13375571 | 657 | A | G | 188 | Asn | Asp |
| 13381468 | 737 | G | A | 214 | Leu | Leu |
| 13375570 | 796 | C | T | 234 | Pro | Leu |
| 13377895 | 808 | G | A | 238 | Ser | Asn |
| 13381465 | 1176 | G | A | N/A | N/A | N/A |

[0901] TABLE D2
Variants of nucleotide sequence CG103322-02

| | Nucleotides | | | Amino Acids | | |
|---|---|---|---|---|---|---|
| Variant | Position | Initial | Modified | Position | Initial | Modified |
| 13381406 | 355 | G | A | 116 | Glu | Glu |
| 13381407 | 361 | T | C | 118 | Gly | Gly |
| 13381410 | 691 | C | G | 228 | Val | Val |

[0902] TABLE D3
Variants of nucleotide sequence CG151575-02

| | Nucleotides | | | Amino Acids | | |
|---|---|---|---|---|---|---|
| Variant | Position | Initial | Modified | Position | Initial | Modified |
| 13381416 | 593 | G | A | 131 | Gly | Ser |
| 13381415 | 736 | C | A | 178 | Asp | Glu |

[0903] TABLE D4
Variants of nucleotide sequence CG152323-01

| | Nucleotides | | | Amino Acids | | |
|---|---|---|---|---|---|---|
| Variant | Position | Initial | Modified | Position | Initial | Modified |
| 13381423 | 162 | T | C | 28 | Cys | Arg |
| 13381425 | 1085 | T | C | 335 | Asn | Asn |
| 13381422 | 3011 | T | C | 977 | Asp | Asp |
| 13381421 | 3156 | G | A | 1026 | Ala | Thr |

[0904] TABLE D5
Variant of nucleotide sequence CG153011-01

| | Nucleotides | | | Amino Acids | | |
|---|---|---|---|---|---|---|
| Variant | Position | Initial | Modified | Position | Initial | Modified |
| 13381522 | 1268 | G | A | 326 | Gly | Arg |

[0905] TABLE D6
Variant of nucleotide sequence CG153042-01

| | Nucleotides | | | Amino Acids | | |
|---|---|---|---|---|---|---|
| Variant | Position | Initial | Modified | Position | Initial | Modified |
| 13381434 | 928 | C | T | 304 | Leu | Phe |

[0906] TABLE D7
Variant of nucleotide sequence CG153179-01

| | Nucleotides | | | Amino Acids | | |
|---|---|---|---|---|---|---|
| Variant | Position | Initial | Modified | Position | Initial | Modified |
| 13381427 | 241 | C | T | 65 | Ser | Ser |

[0907] TABLE D8
Variants of nucleotide sequence CG157760-02

| | Nucleotides | | | Amino Acids | | |
|---|---|---|---|---|---|---|
| Variant | Position | Initial | Modified | Position | Initial | Modified |
| 13381431 | 353 | G | A | 85 | Ser | Asn |
| 13381432 | 500 | C | T | 134 | Ala | Val |

[0908] TABLE D9
Variants of nucleotide sequence CG158114-01

| | Nucleotides | | | Amino Acids | | |
|---|---|---|---|---|---|---|
| Variant | Position | Initial | Modified | Position | Initial | Modified |
| 13381446 | 483 | C | T | 161 | Pro | Pro |
| 13381447 | 563 | T | C | 188 | Leu | Pro |
| 13381450 | 1698 | T | C | 566 | Asn | Asn |

[0909] TABLE D10
Variant of nucleotide sequence CG158553-01

| | Nucleotides | | | Amino Acids | | |
|---|---|---|---|---|---|---|
| Variant | Position | Initial | Modified | Position | Initial | Modified |
| 13381435 | 465 | T | C | 107 | Cys | Cys |

[0910] TABLE D11
Variants of nucleotide sequence CG158983-01

| | Nucleotides | | | Amino Acids | | |
|---|---|---|---|---|---|---|
| Variant | Position | Initial | Modified | Position | Initial | Modified |
| 13377605 | 130 | T | C | 38 | Pro | Pro |
| 13381442 | 154 | G | C | 46 | Thr | Thr |
| 13381443 | 514 | C | T | 166 | Ser | Ser |

[0911] TABLE D12
Variants of nucleotide sequence CG159015-01

| | Nucleotides | | | Amino Acids | | |
|---|---|---|---|---|---|---|
| Variant | Position | Initial | Modified | Position | Initial | Modified |
| 13381457 | 522 | T | C | 149 | Leu | Pro |
| 13381458 | 645 | C | T | 190 | Ser | Phe |
| 13381456 | 734 | G | A | 220 | Val | Ile |
| 13381460 | 801 | C | G | 242 | Ser | Cys |

[0912] TABLE D13
Variants of nucleotide sequence CG173007-01

| | Nucleotides | | | Amino Acids | | |
|---|---|---|---|---|---|---|
| Variant | Position | Initial | Modified | Position | Initial | Modified |
| 13381454 | 45 | T | A | N/A | N/A | N/A |
| 13381453 | 322 | A | G | 75 | Ile | Val |
| 13381452 | 1003 | T | C | 302 | Ser | Pro |
| 13381451 | 1697 | T | C | 533 | Leu | Pro |

[0913] TABLE D14
Variants of nucleotide sequence CG173357-01

| | Nucleotides | | | Amino Acids | | |
|---|---|---|---|---|---|---|
| Variant | Position | Initial | Modified | Position | Initial | Modified |
| 13381463 | 227 | T | C | 68 | Phe | Ser |
| 13381439 | 1877 | G | T | N/A | N/A | N/A |

[0914] TABLE D15
Variant of nucleotide sequence CG50387-03

| | Nucleotides | | | Amino Acids | | |
|---|---|---|---|---|---|---|
| Variant | Position | Initial | Modified | Position | Initial | Modified |
| 13377608 | 1017 | G | A | 339 | Ala | Ala |

[0915] TABLE D16
Variants of nucleotide sequence CG103134-02

| | Nucleotides | | | Amino Acids | | |
|---|---|---|---|---|---|---|
| Variant | Position | Initial | Modified | Position | Initial | Modified |
| 13381413 | 231 | C | T | 61 | His | Tyr |
| 13381402 | 478 | T | C | 143 | Val | Ala |
| 13381414 | 663 | G | C | 205 | Val | Leu |

[0916] TABLE D17
Variants of nucleotide sequence CG57542-01

| | Nucleotides | | | Amino Acids | | |
|---|---|---|---|---|---|---|
| Variant | Position | Initial | Modified | Position | Initial | Modified |
| 13377100 | 495 | C | T | 155 | Asp | Asp |
| 13377101 | 820 | G | A | 264 | Ala | Thr |

[0917] TABLE D18
Variants of nucleotide sequence CG57774-01

| | Nucleotides | | | Amino Acids | | |
|---|---|---|---|---|---|---|
| Variant | Position | Initial | Modified | Position | Initial | Modified |
| 13381484 | 640 | C | T | 180 | Pro | Pro |
| 13381486 | 698 | C | A | 200 | Pro | Thr |
| 13375028 | 1422 | T | C | 441 | Leu | Ser |

[0918] TABLE D19
Variant of nucleotide sequence CG89285-03

| | Nucleotides | | | Amino Acids | | |
|---|---|---|---|---|---|---|
| Variant | Position | Initial | Modified | Position | Initial | Modified |
| 13374612 | 73 | A | G | 9 | Thr | Ala |

[0919] TABLE D20
Variants of nucleotide sequence CG57094-01

| | Nucleotides | | | Amino Acids | | |
|---|---|---|---|---|---|---|
| Variant | Position | Initial | Modified | Position | Initial | Modified |
| 13377892 | 862 | A | G | 237 | Asn | Asp |
| 13375565 | 947 | C | T | 265 | Thr | Met |
| 13377666 | 1379 | G | A | N/A | N/A | N/A |

### Example E

### Molecular Cloning of NOV26 Variants

[0920] For NOV26b, the cDNA coding for the DOMAIN of NOV26a (CG5123-05) from residue 21 to 493 was targeted for “in-frame” cloning by PCR template was based on the previously identified plasmid, when available, or on human cDNA(s). For NOVs 26c-26f, the cDNA coding for the DOMAIN of CG5123-05 from residue 43 to 494 was targeted for “in-frame” cloning by PCR. The PCR template was based on human cDNA(s). NOVs 26g-r, the cDNA coding for the full-length of CG5123-05 from residue 1 to 532 was targeted for the “in-frame” cloning by PCR. The PCR template was based on human cDNA(s).

TABLE E1

Oligonucleotide primers used to clone the target cDNA sequence:

| | | |
|---|---|---|
| NOV26 | | |
| variant | Primers | Sequences |

| | | | |
|---|---|---|---|
| NOV26b | F2 | 5′-AAGCTTGACAGACCTTGGGACCGGGGCCAACACTGG-3′ | (SEQ ID NO:352) |
| | R1 | 5′-CTCGAGAGGAGACATCTCGAAGGGCCACCAAGATGG-3′ | (SEQ ID NO:353) |
| NOV26c-f | F3 | 5′-AAGCTTACTAGGTTTGAGGCGGCCGTGAAGG-3′ | (SEQ ID NO:354) |
| | R1 | 5′-CTCGAGAGGAGACATCTCGAAGGGCCACCAAGATGG-3′ | (SEQ ID NO:355) |
| NOV26g-r | F1 | 5′-AAGCTTCCACCATGTTCCAGTTTCATGCAGGCTCTTGG-3′ | (SEQ ID NO:356) |
| | R2 | 5′-CTCGAGGTTCAGTTTTCTTCTCCTTCTTTGATAG-3′ | (SEQ ID NO:357) |

[0921] For downstream cloning purposes, the forward primer includes an in-frame Hind III restriction site and the reverse primer contains an in-frame Xho I restriction site.

[0922] Two parallel PCR reactions were set up using a total of 0.5-1.0 ng human pooled cDNAs as template for each reaction. The pool is composed of 5 micrograms of each of the following human tissue cDNAs: adrenal gland, whole brain, amygdala, cerebellum, thalamus, bone marrow, fetal brain, fetal kidney, fetal liver, fetal lung, heart, kidney, liver, lymphoma, Burkitt's Raji cell line, mammary gland, pancreas, pituitary gland, placenta, prostate, salivary gland, skeletal muscle, small Intestine, spleen, stomach, thyroid, trachea, uterus.

[0923] When the tissue of expression is known and available, the second PCR was performed using the above primers and 0.5 ng-1.0 ng of one of the following human tissue cDNAs: skeleton muscle, testis, mammary gland, adrenal gland, ovary, colon, normal cerebellum, normal adipose, normal skin, bone marrow, brain amygdala, brain hippocampus, brain substantia nigra, brain thalamus, thyroid, fetal lung, fetal liver, fetal brain, kidney, heart, spleen, uterus, pituitary gland, lymph node, salivary gland, small intestine, prostate, placenta, spinal cord, peripheral blood, trachea, stomach, pancreas, hypothalamus.

[0924] The reaction mixtures contained 2 microliters of each of the primers (original concentration: 5 pmol/ul), 1 microliter of 10 mM dNTP (Clontech Laboratories, Palo Alto Calif.) and 1 microliter of 50×Advantage-HF 2 polymerase (Clontech Laboratories) in 50 microliter-reaction volume. The following reaction conditions were used:

PCR condition 1:
a) 96° C. 3 minutes
b) 96° C. 30 seconds denaturation
c) 60° C. 30 seconds, primer annealing
d) 72° C. 6 minutes extension
Repeat steps b-d 15 times
e) 96° C. 15 seconds denaturation
f) 60° C. 30 seconds, primer annealing
g) 72° C. 6 minutes extension
Repeat steps e-g 29 times
e) 72° C. 10 minutes final extension
PCR condition 2:
a) 96° C. 3 minutes
b) 96° C. 15 seconds denaturation
c) 76° C. 30 seconds, primer annealing, reducing the temperature
by 1° C. per cycle
d) 72° C. 4 minutes extension
Repeat steps b-d 34 times
e) 72° C. 10 minutes final extension

[0925] An amplified product was detected by agarose gel electrophoresis. The fragment was gel-purified and ligated into the pCR2.1 vector (Invitrogen, Carlsbad, Calif.) following the manufacturer's recommendation. Twelve clones per PCR reaction were picked and sequenced. The inserts were sequenced using vector-specific M13 Forward and M13 Reverse primers and the gene-specific primers in Table .

TABLE E2

Gene-specific Primers

| | | |
|---|---|---|
| NOV26 | | |
| variant | Primers | Sequences |

| | | | |
|---|---|---|---|
| NOV26b | SF1 | GCAGTCTCTGAAGGACATTCTGCAT | (SEQ ID NO:358) |
| | SF2 | TGTTATTCCTGCCATCTTCTCCTCC | (SEQ ID NO:359) |
| | SF3 | ACTTCACTGTCTGAATCGCTTGTCA | (SEQ ID NO:360) |
| | SF4 | TTCTTATGGTCTGCTGACTTCTTCATC | (SEQ ID NO:361) |
| | SF5 | TGACACGCAGCAATTCTTCAACTTT | (SEQ ID NO:362) |
| | SR1 | ACTGCAGAAACTGGAAACGCTGACT | (SEQ ID NO:363) |
| | SR2 | GAGAAGATGGCAGGAATAACAGCG | (SEQ ID NO:364) |
| | SR3 | GTTTACTGTGATTCTATGGAACAATTTGG | (SEQ ID NO:365) |
| | SR4 | CCATAAGAATTTGGAAGTCATTGTCACTAA | (SEQ ID NO:366) |
| | SR5 | TCATAGGTCCATTTTATGAAATTGTCGAG | (SEQ ID NO:367) |
| NOV25e-f | SF1 | CATGTCCTCCTGCAGTCTCATCA | (SEQ ID NO:368) |
| | SF2 | CTTCAACTGCAACCACCTGCATATTCC | (SEQ ID NO:369) |
| | SF3 | GCTGAATTCCTGTAACATCTTCAACA | (SEQ ID NO:370) |
| | SF4 | TTTTCTTATCATTATCACTTTGTTCTGCTCC | (SEQ ID NO:371) |
| | SF5 | ATTCTTCAACTTTCTCAGTCATTGGC | (SEQ ID NO:372) |
| | SR1 | GCTGATGAGACTGCAGGAGGACAT | (SEQ ID NO:373) |
| | SR2 | GAAAAGGTGAAGTCAAGCATGGAGG | (SEQ ID NO:374) |
| | SR3 | TCAGCATTTGACAAGCGATTCAG | (SEQ ID NO:375) |
| | SR4 | AAGAAGTCAGCAGACCATAAGAATTTG | (SEQ ID NO:376) |
| | SR5 | GCTGCGTGTCATAGGTCCATTTT | (SEQ ID NO:377) |
| NOV26g-r | SF1 | CAAAGCAGTCAGCGTTTCCAGTTTCT | (SEQ ID NO:378) |
| | SF2 | CGCTGTTATTCCTGCCATCTTCTC | (SEQ ID NO:379) |
| | SF3 | TCGCTTGTCAAATGCTGAATTCCT | (SEQ ID NO:380) |
| | SF4 | TATCACTTTGTTCTGCTCCTTTCACTT | (SEQ ID NO:381) |
| | SF5 | TCAACATATGCAATCATGGCTTCC | (SEQ ID NO:382) |
| | SR1 | GCAAAATCATCAACATCAACATTGCAG | (SEQ ID NO:383) |
| | SR2 | AGGCGGAGAAACTGACGAATTCTCTAA | (SEQ ID NO:384) |
| | SR3 | ACAAGCGATTCAGACAGTGAAGTTTA | (SEQ ID NO:385) |
| | SR4 | TGATAAGAAAATGATGAAGAAGTCAGC | (SEQ ID NO:386) |
| | SR5 | TGAAAAAGATTATTGAAACTATGCCAA | (SEQ ID NO:387) |

### Example F1

### Angiopoietin-Related Protein (ARP) and Methods of Using ARP

[0926] The present invention relates to ARP, a gene surprisingly found to be differentially expressed in clear cell Renal cell carcinoma tissues vs the normal adjacent kidney tissues. Furthermore, this invention demonstrates that ARP is surprisingly differentially expressed in small airway epithelium activated by TNF alpha and IL-1 beta, as well as by lung fibroblasts stimulated by IL-4, IL-9, IL-13 and Interferon gamma relative to untreated lung fibroblasts. Finally, a striking, unexpected upregulation of expression of ARP was observed in Lymphokine-activated killer (LAK) cells treated with the phorbol ester: phorbol- 12, 13-myristate acetate (PMA) in combination with ionomycin, relative to the resting cells.

[0927] The present invention discloses a method of using ARP as a clinical marker for staging clear cell Renal cell carcinomas. Furthermore, increased expression of ARP by stimulated LAK cells may play a role in reduced susceptibility of tumor cells to depletion by LAK cells. For the first time, we are disclosing that ARP may be involved with asthma, allergy and emphysema and that regulating ARP by protein therapeutics, antibodies directed against ARP or by small molecule antagonists may alleviate the symptoms of these pulmonary disorders. The invention also discloses a method of treating a pathology treatable by modulating ARP expression, specifically clear cell Renal cell carcinomas.

### Example F2

### Differential Gene Expression in Clear Cell Renal Cell Carcinomas vs Normal Adjacent Tissues

[0928] In order to obtain a comprehensive profile of those genes whose expression is modulated in clear cell Renal cell carcinomas, GeneCalling™ technology, described in detail in Shimkets et al. (1999) and in U.S. Pat. No. 5871697, was used to distinguish the gene expression profile of clear cell Renal cell carcinoma tissues with the normal adjacent tissues, obtained from the same patient, during surgical nephrectomy. The tissues were provided to CuraGen from the NDRI under an IRB approved protocol. GeneCalling™ technology relies on Quantitative Expression Analysis to generate the gene expression profile of a given sample and then generates differential expression analysis of pair-wise comparison of these profiles to controls. The comparison in this example is a pool of all tumor tissues vs. a pool of all normal tissues. Polynucleotides exhibiting differential expression were confirmed by conducting a PCR reaction according to the GeneCalling™ protocol, with the addition of a competing unlabelled primer that prevents the amplification from being detected.

[0929] Angiopoetin Related Protein (ARP) is overexpressed in 3/5 clear cell renal cell carcinomas, 0/2 papillary renal cell carcinomas and 0/2 uncharacterized renal cell carcinomas (panel 2D). Furthermore ARP is expressed in fetal kidney and renal cell carcinoma-derived cell lines but not in adult kidney (panel 1.3D), an indication of an oncofetal expression pattern often associated with genes involved in kidney development and organogenesis and kidney tumorgenesis.

[0930] Data from Panel 4D, indicates that upon immune-stimulation of the airway epithelial cells and lung fibroblasts, ARP is expressed at increased levels. Specifically, we show that expression of ARP in small airway epithelial cells treated with TNF alpha and IL-1 beta is up-regulated ca. 5.4 fold relative to untreated cells. In addition, expression in normal human lung fibroblast cells treated with IL-4, IL-9, IL-9, IL-13 and Interferon gamma is upregulated 7.4, 2, 3.5 and 6.5 fold, respectively, compared to that in resting cells. Finally, expression of ARP in LAK cells treated with PMA/ionomycin is upregulated over 350 fold relative to the expression in resting cells. These data indicate that ARP plays a role in inflammation related to the above cells of the pulmonary system and is thereby implicated as a target for therapeutic intervention by protein and antibody therapeutics as well as small molecule pharmaceuticals. A wholly human antibody directed at ARP, for example, may diminish the symptoms of patients with allergy, asthma or emphysema. A reference (and references therein) for relating airway epithelial cells to asthma and inflammation is: J. Exp. Med. Volume 193, pp339-351 by Michael J. Walter et al. (2001). Another reference for lung fibroblasts and a discussion of asthma and allergy may be found in the review: (abstract included) 1: J Allergy Clin Immunol December 1999;104(6):1139-46 Genetic and environmental interaction in allergy and asthma. Colgate S T Respiratory Cell and Molecular Biology Research Division, Southampton General Hospital, Southampton, United Kingdom.

[0931] The upregulation of stimulated LAK cells as seen in Panel 4D-FIG. 4 (greater than 350 fold) was remarkable and surprising. The following references about PMA activation of LAK cells are relevant to the present invention:

[0932] 1.) Correale P, Procopio A, Celio L, Caraglia M, Genua G, Coppola V, Pepe S, Normanno N, Vecchio I, Palmieri G, et al.

[0933] Phorbol 12-myristate 13-acetate induces resistance of human melanoma cells to natural-killer- and lymphokine-activated-killer-mediated cytotoxicity. Cancer Immunol Immunother. 1992;34(4):272-8. PMID: 1371427

[0934] 2.) Maleci A, Alterman R L, Sundstrom D, Kornblith P L, Moskal J R.

[0935] Effect of phorbol esters on the susceptibility of a glioma cell line to lymphokine-activated killer cell activity. J Neurosurg. July 1990;73(l):91-7. PMID: 2352027

[0936] 3.) Nishimura T, Burakoff S J, Herrmann S H.

[0937] Inhibition of lymphokine-activated killer cell-mediated cytotoxicity by phorbol ester. J Immunol. Mar. 15, 1989;142(6):2155-61. PMID: 2646377

[0938] Work discussed in 3) indicates that PMA induces down-regulation of LAK cell-mediated cytotoxicity (by inactivation of protein kinase C activity in LAK cells). The exact role of ARP is not known as yet in LAK cells, however, based on the TaqMan data presented in this invention, ARP plays a role in inflammation and may be implicated in the ability of LAK cells to effectively destroy tumor cells as well. Therefore a therapeutic antibody directed against ARP (and thereby preventing ARP from being upregulated), may be therapeutic in treating cancer because of the resulting increased activity of LAK cells.

### Example F3

### Comparing Expression of ARP with Vascular Endothelial Growth Factor (VEGF) Expression

[0939] Paradis and coworkers assessed VEGF expression in a large series of renal tumors with a long follow-up, correlated with the usual histo-prognostic factors and survival. Their study revealed that in the group of clear cell RCCs, VEGF expression was positively correlated with both nuclear grade (P=0.05) and size of the tumor (P=0.05). Furthermore, a significant correlation was observed between VEGF expression and microvascular count (P=0.04). Finally, cumulative survival rate was significantly lower in the group of patients with clear cell RCCs expressing VEGF (log rank test, P=0.01). In the Cox model, VEGF expression was a significant independent predictor of outcome, as well as stage and nuclear grade. (Paradis V, Lagha N B, Zeimoura L, Blanchet P, Eschwege P, Ba N, Benoit G, Jardin A, Bedossa P. Expression of vascular endothelial growth factor in renal cell carcinomas. Virchows Arch April 2000;436(4):351-6). The expression profile of VEGF was compared with the expression profile of ARP. As shown in FIG. 3, ARP overexpression is higher and more specific than VEGF, indicating that it could be used as a better clinical marker and that more efficacious and specific therapeutics can be directed at regulating ARP expression. These results also indicate that a treatment that modulates the expression of VEGF and ARP at the same time may achieve synergistic effects. An example of a treatment that can mitigate the effects of the expression of both VEGF and ARP is a bispecific antibody directed both these targets. The bi-specific antibody contemplated to be within the scope of claims for this invention may be an antibody generated by quadroma technology, or by chemical cross-linking of mono-specific antibodies (one directed against VEGF, the other against ARP) or a bi-specific single chain antibody dimer. Formulations of single chain antibodies may include, but not limited to: VL(a)-Linker-VH(a)-Linker-VL(b)-Linker-VH(b). For examples of bispecific antibodies see: U.S. Pat. No. 6,030,792 by Otterness et al., the references therein included here, Multivalent single chain antibodies, U.S. Pat. Nos. 5,892,020, 5,877,291 by Mezes et al., U.S. Pat. No. 6,071,515: Dimer and multimer forms of single chain polypeptides by Mezes et al., and U.S. Pat. No. 6,121,424: Multivalent antigen-binding proteins by Whitlow et al.

### Example F4

### Human PPAR Gamma Angiopoietin Related Protein

[0940] Human PPAR gamma angiopoietin related protein is also known as angiopoietin related protein (GenBank ID AF153606), human hepatic angiopoietin-related protein (GeneBank ID AF169312) or angiopoietin-like protein PPl 158 (GeneBank ID AF202636). Recombinant HFARP acts as an apoptosis survival factor for vascular endothelial cells, but does not bind to Tie1 or Tie2 (endothelial-cell tyrosine kinase receptors). These results suggest that HFARP may exert a protective function on endothelial cells through an endocrine action.

[0941] (Hepatic expression, synthesis and secretion of a novel fibrinogen/angiopoietin-related protein that prevents endothelial-cell apoptosis. Kim I, Kim H G, Kim H, Kim H H, Park S K, Uhm C S, Lee Z H, Koh G Y Biochem J Mar. 15, 2000; 346 Pt 3:603-10.).

[0942] The transcriptional induction of PGAR follows a rapid time course typical of immediate-early genes and occurs in the absence of protein synthesis. The expression of PGAR is predominantly localized to adipose tissues and placenta and is consistently elevated in genetic models of obesity. Hormone-dependent adipocyte differentiation coincides with a dramatic early induction of the PGAR transcript. Alterations in nutrition and leptin administration are found to modulate the PGAR expression in vivo. Taken together, these data suggest a possible role for PGAR in the regulation of systemic lipid metabolism or glucose homeostasis. (Peroxisome proliferator-activated receptor gamma target gene encoding a novel angiopoietin-related protein associated with adipose differentiation. Yoon J C, Chickering T W, Rosen E D, Dussault B, Qin Y, Soukas A, Friedman J M, Holmes W E, Spiegelman B M Mol Cell Biol Jul. 20, 2000 (14):5343-9). The mouse ortholog gene is known as fasting-induced adipose factor FIAF is strongly up-regulated by fasting in white adipose tissue and liver. Moreover, FIAF mRNA is decreased in white adipose tissue of PPARgamma +/− mice. FIAF protein can be detected in various tissues and in blood plasma, suggesting that FIAF has an endocrine function. Its plasma abundance is increased by fasting and decreased by chronic high fat feeding.

| | |
|---|---|
| AF153606.1 Homo sapiens angiopoietin-related protein mRNA | |
| GCGGATCCTCACACGACTGTGATCCGATTCTTTCCAGCGGCTTCTGCAACCAAGCGGGTCTTACCCCCGG | (SEQ ID NO:388) |
| TCCTCCGCGTCTCCAGTCCTCGCACCTGGAACCCCAACGTCCCCGAGAGTCCCCGAATCCCCGCTCCCAG | |
| GCTACCTAAGAGGATGAGCGGTGCTCCGACGGCCGGGGCAGCCCTGATGCTCTGCGCCGCCACCGCCGTG | |
| CTACTGAGCGCTCAGGGCGGACCCGTGCAGTCCAAGTCGCCGCGCTTTGCGTCCTGGGACGAGATGAATG | |
| TCCTGGCGCACGGACTCCTGCAGCTCGGCCAGGGGTGCGCGAACACCGGAGCGCACCCGCAGTCAGCTGA | |
| GCGCGCTGGAGCGCGCCTGAGCGCGTGCGGGTCCGCCTGTCAGGGAACCGAGGGGTCCACCGACCTCCCG | |
| TTAGCCCCTGAGAGCCGGGTGGACCCTGAGGTCCTTCACACCCTGCAGACACAACTCAAGGCTCAGAACA | |
| GCAGGATCCAGCAACTCTTCCACAAGGTGGCCCAGCAGCAGCGGCACCTGGAGAAGCAGCACCTGCGAAT | |
| TCAGCATCTGCAAAGCCAGTTTGGCCTCCTGGACCACAAGCACCTAGACCATGAGGTGGCCAAGCCTGCC | |
| CGAAGAAAGAGGCTGCCCGACATGGCCCAGCCAGTTGACCCGGCTCACAATGTCAGCCGCCTGCACCGGC | |
| TGCCCAGGGATTGCCAGGAGCTGTTCCAGGTTGGGGAGAGGCAGAGTGGACTATTTGAAATCCAGCCTCA | |
| GGGGTCTCCGCCATTTTTGGTGAACTGCAAGATGACCTCAGATGGAGGCTGGACAGTAATTCAGAGGCCC | |
| CACGATGGCTCAGTGGACTTCAACCGGCCCTGGGAAGCCTACAAGGCGGGGTTTGGGGATCCCCACGGCG | |
| AGTTCTGGCTGGGTCTGGAGAAGGTGCATAGCATCACGGGGGACCGCAACAGCCGCCTGGCCGTCCAGCT | |
| GCGGGACTGGCATGOCAACGCCGAGTTGCTGCAGTTCTCCGTGCACCTGGGTGGCGAGGACACGGCCTAT | |
| AGCCTGCAGCTCACTGCACCCGTGGCCGGCCAGCTGGGCGCCACCACCGTCCCACCCAGCGGCCTCTCCG | |
| TACCCTTCTCCACTTGGGACCAGGATCACGACCTCCGCAGGGACAAGAACTGCGCCAAGAGCCTCTCTGG | |
| AGGCTGGTGGTTTGGCACCTGCAGCCATTCCAACCTCAACGGCCAGTACTTCCGCTCCATCCCACAGCAG | |
| CGGCAGAAGCTTAAGAAGGGAATCTTCTGGAAGACCTGGCGGGGCCGCTACTACCCGCTGCAGGCCACCA | |
| CCATGTTGATCCAGCCCATGGCAGCAGAGGCAGCCTCCTAGCGTCCTGGCTGGGCCTGGTCCCAGGCCCA | |
| CGAAAGACGGTGACTCTTGGCTCTGCCCGAGGATGTGGCCAAGACCACGACTGGAGAAGCCCCCTTTCTG | |
| AGTGCAGGGGGGCTGCATGCGTTGCCTCCTGAGATCGAGGCTGCAGGATATGCTCAGACTCTAGAGGCGT | |
| GGACCAAGGGGCATGGAGCTTCACTCCTTGCTGGCCAGGGAGTTGGGGACTCAGAGGGACCACTTGGGGC | |
| CAGCCAGACTGGCCTCAATGGCGGACTCAGTCACATTGACTGACGGGGACCAGGGCTTGTGTGGGTCGAG | |
| ACCGCCCTCATGGTGCTGGTGCTGTTGTGTGTAGGTCCCCTGGGGACACAAGCAGGCGCCAATGGTATCT | |
| GGGCGGAGCTCACAGAGTTCTTGGAATAAAGCAACCTCAGAACAAAAAAAAAAAAAAAAAAGCGGAGCT | |
| CACAGAGTTCTTGGAATAAAAGCAACCTCAGAACAAAAAA | |
| AF169312 hepatic angiopoietin-related protein (ANGPTL2) | |
| TCGCACCTGGAACCCCAACGTCCCCGAGAGTCCCCGAATCCCCGCTCCCAGGCTACCTAAGAGGATGACC | (SEQ ID NO:389) |
| GGTGCTCCGACGGCCGGGGCAGCCCTGATGCTCTGCGCCGCCACCGCCGTGCTACTGAGCGCTCAGGGCG | |
| GACCCGTGCAGTCCAAGTCGCCGCGCTTTGCGTCCTGGGACGAGATGAATGTCCTGGCGCACCGACTCCT | |
| GCAGCTCGGCCAGGGGCTGCGCGAACACGCGGAGCGCACCCGCAGTCAGCTGAGCGCGCTGGAGCGGCGC | |
| CTGAGCGCGTGCGGGTCCGCCTGTCAGGGAACCGAGGGGTCCACCGACCTCCCGTTAGCCCCTGAGAGCC | |
| GGGTGGACCCTGAGGTCCTTCACAGCCTGCAGACACAACTCAAGGCTCAGAACAGCAGGATCCAGCAACT | |
| CTTCCACAAGGTGGCCCAGCAGCAGCGGCACCTGGAGAAGCAGCACCTGCGAATTCAGCATCTGCAAAGC | |
| CAGTTTGGCCTCCTGGACCACAAGCACCTAGACCATGAGGTGGCCAAGCCTGCCCGAAGAAAGAGGCTGC | |
| CCGAGATGGCCCAGCCAGTTGACCCGCCTCACAATGTCAGCCGCCTGCACCGGCTGCCCAGGGATTGCCA | |
| GGAGCTGTTCCAGGTTGGGGAGAGCCAGAGTGGACTATTTGAAATCCACCCTCAGGGGTCTCCGCCATTT | |
| TTGGTGAACTGCAAGATGACCTCAGATGCAGGCTGGACAGTAATTCAGAGGCGCCACGATGGCTCAGTGG | |
| ACTTCAACCGGCCCTGGGAAGCCTACAAGGCGGGGTTTGGGGATCCCCACGGCGAGTTCTGGCTGGGTCT | |
| CGAGAAGGTGCATAGCATCATGGGGGACCGCAACACCCGCCTGGCCGTGCAGCTGCGGGACTGGGATGGC | |
| AACGCCGAGTTGCTGCAGTTCTCCGTGCACCTGGGTGGCGAGGACACGGCCTATAGCCTGCAGTTCACTG | |
| CACCCGTGGCCGGCCAGCTGGGCGCCACCACCGTCCCACCCAGCGGCCTCTCCGTACCCTTCTCCACTTG | |
| GGACCAGGATCACGACCTCCGCAGGGACAAGAACTGCGCCAAGAGCCTCTCTGGAGGCTGGTGGTTTGGC | |
| ACCTGCAGCCATTCCAACCTCAACGGCCACTACTTCCGCTCCATCCCACAGCAGCGGCAGAAGCTTAAGA | |
| AGGGAATCTTCTGGAAGACCTGGCGGGGCCGCTACTACTCGCTGCAGGCCACCACCATGTTGATCCAGCC | |
| CATGGCAGCAGAGGCAGCCTCCTAGCGTCCTGGCTGGGCCTGGTCCCAGCCCCACGAAAGACGGTGACTC | |
| TTGGCTCTGCCCGAGGATGTGGCCGTTCCCTGCCTGGGCAGCGGCTCCAAGGAGGGGCCATCTGGAAACT | |
| TGTGGACAGAGAA | |
| AF2 02636 angiopoietin-Iike protein PP1158 | |
| GGAGAAGAAGCCGAGCTGAGCGGATCCTCACACGACTGTGATCCGATTCTTTCCAGCGGCTTCTGCAACC | (SEQ ID NO:390) |
| AACCGGGTCTTACCCCCGGTCCTCCGCGTCTCCAGTCCTCGCACCTGGAACCCCAACGTCCCCGAGAGTC | |
| CCCGAATCCCCGCTCCCAGGCTACCTAAGAGGATGAGCGGTGCTCCGACGGCCGGGGCAGCCCTGATGCT | |
| CTGCGCCGCCACCGCCGTGCTACTGAGCGCTCAGGGCGGACCCGTGCAGTCCAAGTCGCCGCGCTTTGCG | |
| TCCTCGGACGAGATGAATGTCCTCGCGCACGGACTCCTGCAGCTCGGCCAGGGGCTGCGCGAACACGCGG | |
| AGCGCACCCGCAGTCAGCTGAGCGCGCTGGAGCGGCGCCTGAGCGCGTGCGGGTCCGCCTGTCAGGGAAC | |
| CGAGGGGTCCACCGACCTCCCGTTAGCCCCTGAGAGCCGGGTGGACCCTGAGGTCCTTCACAGCCTGCAG | |
| ACACAACTCAAGGCTCAGAACAGCAGGATCCAGCAACTCTTCCACAAGGTGGCCCAGCAGCAGCGGCACC | |
| TGGAGAAGCAGCACCTGCGAATTCAGCATCTGCAAAGCCAGTTTGGCCTCCTGGACCACAAGCACCTAGA | |
| CCATGAGGTGGCCAAGCCTGCCCGAAGAAAGAGGCTGCCCGAGATGGCCCAGCCAGTTGACCCGGCTCAC | |
| AATGTCAGCCGCCTGCACCGGCTGCCCAGGGATTGCCAGGAGCTGTTCCAGGTTGGGGAGAGCCAGAGTG | |
| GACTATTTGAAATCCAGCCTCAGGGGTCTCCGCCATTTTTGGTGAACTGCAAGATGACCTCAGATGGAGG | |
| CTGGACAGTAATTCAGAGGCGCCACGATGGCTCAGTGGACTTCAACCGGCCCTGGGAAGCCTACAAGGCG | |
| GGGTTTGGGGATCCCCACGGCGAGTTCTGGCTGGGTCTGGAGAAGGTGCATAGCATCACGGGGGACCGCA | |
| ACAGCCGCCTGGCCGTGCAGCTGCGGGACTGGGATGGCAACGCCGAGTTGCTGCAGTTCTCCGTGCACCT | |
| GGGTGGCGAGGACACGGCCTATAGCCTGCAGCTCACTGCACCCGTGGCCGGCCAGCTGGGCGCCACCACC | |
| GTCCCACCCAGCGGCCTCTCCGTACCCTTCTCCACTTGGGACCAGGATCACGACCTCCGCAGGGACAAGA | |
| ACTGCGCCAAGAGCCTCTCTGGAGGCTGGTGGTTTGGCACCTGCAGCCATTCCAACCTCAACGGCCAGTA | |
| CTTCCGCTCCATCCCACAGCAGCGGCAGAAGCTTAAGAAGGGAATCTTCTGGAAGACCTGGCGGGGCCGC | |
| TACTACCCGCTGCAGGCCACCACCATGTTGATCCAGCCCATGGCAGCAGAGGCAGCCTCCTAGCGTCCTG | |
| GCTGGGCCTGGTCCCAGGCCCACGAAAGACGGTGACTCTTGGCTCTGCCCGAGGATGTGGCCGTTCCCTG | |
| CCTGGGCAGGGGCTCCAAGGAGGGGCCATCTGGAAACTTGTGGACAGAGAAGAAGACCACCACTGGAGAA | |
| GCCCCCTTTCTGAGTGCAGGGGGGCTGCATGCGTTGCCTCCTGAGATCGAGGCTGCAGGATATGCTCAGA | |
| CTCTAGAGGCGTGGACCAAGGGGCATCGAGCTTCACTCCTTGCTGGCCAGGGAGTTGGGGACTCAGAGGG | |
| ACCACTTGGGGCCAGCCAGACTGGCCTCAATCGCGGACTCAGTCACATTGACTGACGGGGACCAGGGCTT | |
| GTGTGGGTCGAGAGCGCCCTCATGGTGCTGGTGCTGTTGTGTGTAGGTCCCCTGGGGACACAAGCAGGCG | |
| CCAATGGTATCTGGGCGGCGTCACAGAGTTCTTGGAATAAAAGCAACCTCAGAACACTTAAAAAAAAAAA | |
| AAAAAAAAAAAAAAAAAAAAAAAAAAAAAAAAAAAAAAAAAAAAAAAAAAAAA | |
| NP_057193 angiopoietin related protein | |
| MSGAPTAGAALMLCAATAVLLSAQGGPVQSKSPRFASWDEMNVLAHGLLQLGQGCANTGAHPQSAERAGA | (SEQ ID NO:391) |
| RLSACGSACQGTEGSTDLPLAPESRVDPEVM1SLQTQLKAQNSRIQQLFHKVAQQQRHLEKQHLRIQHLQ | |
| SQFGLLDHKHLDHEVAKPARRKRLPEMAQPVDPAHNVSRLHRLPRDCQELFQVGERQSGLFEIQPQGSPP | |
| FLVNCKMTSDGGWTVIQRRHDGSVDFNRPWEAYKAGFGDPHGEFWLGLEKVHSITGDRNSRLAVQLRDWD | |
| GNAELLQFSVHLGGEDTAYSLQLTAPVAGQLGATTVPPSGLSVPFSTWDQDHDLRRDKNCAKSLSGGWWF | |
| GTCSHSNLNGQYFRSIPQQRQKLKKGIFWKTWRGRYYPLQATTMLIQPMAAEAAS | |
| AAG22490 angiopoietin-like protein PP1158 | |
| MSGAPTAGAALMLCAATAVLLSAQGGPVQSKSPRFASWDEMNVLAHGLLQLGQGLREHAERTRSQLSALE | (SEQ ID NO:392) |
| RRLSACGSACQGTEGSTDLPLAPESRVDPEVLHSLQTQLKAQNSRIQQLFHKVAQQQRHLEKQHLRIQHL | |
| QSQFGLLDHKHLDHEVAKPARRKRLPEMAQPVDPAHNVSRLHRLPRDCQELFQVGERQSGLFEIQPQGSP | |
| PFLVNCKMTSDGGWTVIQRRHDGSVDFNRPWEAYKAGFGDPHGEFWLGLEKVHSITGDRNSRLAVQLRDW | |
| DGNAELLQFSVHLGGEDTAYSLQLTAPVAGQLGATTVPPSGLSVPFSTWDQDHDLRRDKNCAKSLSGGWW | |
| FGTCSHSNLNGQYFRSIPQQRQKLKKGIFWKTWRGRYYPLQATTMLIQPMAAEAAS | |

### Example F5

### GeneCalling Results from Job 36320—all Kidney Cancer vs all Kidney NAT

[0943]

| ARP—Human angiopoletin-related | | | |
|---|---|---|---|
| protein. (growth factor) | 1 | 1 of 2 | 3 of 9 |

| gbh_af153606 | | Band | Fold | | 67.1 | Set | Visual | | Trap Info | |
|---|---|---|---|---|---|---|---|---|---|---|
| Band ID | Offset | Confirm | Diff. | Sig | Set A | B | Inspection | [symbol] | Score | J1 J2 R1 R2 |

| | | | | | | | | | |
|---|---|---|---|---|---|---|---|---|---|
| d0p0-69.5 | 493 | unconf. | 2.3 | 91 | 108.4 (33.6) | 47.3 (6.1) | [symbol] | [symbol] | |
| q0c0-131.2 (131.2) | 896 | Pass- Complete | 67.3 | 96 | 853.2 (444) | 12.7 (2.6) | [symbol] | [symbol] [symbol] [symbol] | 1 comment |
| p0c0-131.1 | 896 | unconf. | 5.2 | 1 | 398.9 (143.6) | 76.2 (9.7) | [symbol] | [symbol] | |

[0944] Results of the GeneCalling job 36320 comparing renal cancers to normal adjacent kidney tissues. Polynucleotides—for e.g. Band ID g0c0-131.2 was identified as being differentially expressed and was confirmed by conducting a PCR reaction according to the GeneCalling™ protocol, with the addition of a competing unlabelled primer that prevents the amplification from being detected and is represented as “Pass complete” in the chart above.

[0945] Example F6

[0946] TaqMan Panels

[image]

[image]

[image]

### Example F8

### Comparing VEGF and ARP

[0947] QEA electrophoresis profile for VEGF (A) and ARP (B) and RTQ-PCR expression profile for VEGF (C) and ARP (D). The differential expression profile of the CG57094 is better than VEGF as demonstrated by GeneCalling and RTQ-PCR.

[image]

### Example F9

### Gene Expression in Tumor Cells Exposed to Serum Starvation, Acidosis and Anoxia and in Brain Tumor Xenograft, RTQ-PCR on HASS Panel v 1.0

[0948] The microenvironment within tumors is significantly different from that in normal tissues. Many regions within tumors are transiently or chronically hypoxic due to unbalanced blood supply and significant perfusion heterogeneities. This exacerbates tumor cells' natural tendency to overproduce acids, resulting in very acidic ph values. The hypoxia, trophic limitation and acidity of tumors have important consequences for antitumor therapy and can contribute to the progression of tumors to a more aggressive metastatic phenotype. By subject a set of tumor cell lines to serum starvation, acidosis and anoxia for different time periods, we are modeling the tumor microenviroment.

[0949] The HASS panel v 1.0 plates are comprised of 93 cDNA samples and two controls. Specifically, 81 of these samples are derived from cultured human cancer cell lines that had been subjected to serum starvation, acidosis and anoxia for different time periods as well as controls for these treatments, 3 samples of human primary cells, 9 samples of malignant brain cancer (4 medulloblastomas and 5 glioblastomas) and 2 controls. The human cancer cell lines are obtained from ATCC (American Type Culture Collection) and fall into the following tissue groups: breast cancer, prostate cancer, bladder carcinomas, pancreatic cancers and CNS cancer cell lines. These cancer cells are all cultured under standard recommended conditions. The treatments used (serum starvation, acidosis and anoxia) have been previously published in the scientific literature. The primary human cells were obtained from Clonetics (Walkersville, Md.) and were grown in the media and conditions recommended by Clonetics. The malignant brain cancer samples are obtained as part of a collaboration (Henry Ford Cancer Center) and are evaluated by a pathologist prior to CuraGen receiving the samples. RNA was prepared from these samples using the standard procedures. The genomic and chemistry control wells have been described previously.

[0950] Results:

[0951] CG57094 is expressed at the highest level in U87 cells exposed to hypoxia and acidosis (CT=22.7). The expression of this gene is induced in MCF-7 (breast cancer cell line), T24 (bladder cancer cell line), CaPaN (pancreatic cancer cell line), U87 (CNS cancer), and LnCAP (prostate cancer) cells exposed to low oxygen concentrations. This indicates that expression of this gene may be induced in areas of low oxygen tension in tumors. The gene is also expressed at a higher level in gliomas compared to medulloblastoms and may be used as a marker to distinguish the different kinds of brain cancer. Hence, the therapeutic inhibition of this gene activity, through the use of small molecule drugs or antibodies, might be of utility in the treatment of the above listed cancer types.

[image]

TABLE F9

| | Rel. Expr., % |
|---|---|
| Tissue Name | tm11202t_ag2012_a1 |
| MCF-7 C1 | 0.2 |
| MCF-7 C2 | 0.2 |
| MCF-7 C3 | 0.3 |
| MCF-7 C4 | 0.2 |
| MCF-7 C5 | 0.3 |
| MCF-7 C6 | 0.6 |
| MCF-7 C7 | 6.6 |
| MCF-7 C9 | 10 |
| MCF-7 C10 | 0.4 |
| MCF-7 C11 | 0.1 |
| MCF-7 C12 | 0.5 |
| MCF-7 C13 | 4.5 |
| MCF-7 C15 | 4.2 |
| MCF-7 C16 | 0.6 |
| MCF-7 C17 | 1 |
| T24 D1 | 2.9 |
| T24 D2 | 0.5 |
| T24 D3 | 1.7 |
| T24 D4 | 1.3 |
| T24 D5 | 2.7 |
| T24 D6 | 0.1 |
| T24 D7 | 20.6 |
| T24 D9 | 4.4 |
| T24 D10 | 0.9 |
| T24 D11 | 0.7 |
| T24 D12 | 0.3 |
| T24 D13 | 14.7 |
| T24 D15 | 3.9 |
| T24 D16 | 1.2 |
| T24 D17 | 2.9 |
| CAPaN B1 | 3.8 |
| CAPaN B2 | 1.9 |
| CAPaN B3 | 0.6 |
| CAPaN B4 | 1.3 |
| CAPaN B5 | 1.7 |
| CAPaN B6 | 5.6 |
| CAPaN B7 | 23 |
| CAPaN B8 | 20.3 |
| CAPaN B9 | 59.9 |
| CAPaN B10 | 1.9 |
| CAPaN B11 | 1.9 |
| CAPaN B12 | 4.6 |
| CAPaN B13 | 40.9 |
| CAPaN B14 | 8.1 |
| CAPaN B15 | 5 |
| CAPaN B16 | 8.5 |
| CAPaN B17 | 18.1 |
| U87-MG F1 (B) | 1.8 |
| U87-MG F2 | 1.2 |
| U87-MG F3 | 0 |
| U87-MG F4 | 2.4 |
| U87-MG F5 | 3.9 |
| U87-MG F6 | 0 |
| U87-MG F7 | 59.9 |
| U87-MG F8 | 16.8 |
| U87-MG F9 | 39 |
| U87-MG F10 | 9.3 |
| U87-MG F11 | 0.1 |
| U87-MG F12 | 4.9 |
| U87-MG F13 | 71.1 |
| U87-MG F14 | 30 |
| U87-MG F15 | 100 |
| U87-MG F16 | 7 |
| U87-MG F17 | 14.6 |
| LnCAP A1 | 0.1 |
| LnCAP A2 | 0.1 |
| LnCAP A3 | 0.1 |
| LnCAP A4 | 0.1 |
| LnCAP A5 | 0 |
| LnCAP A6 | 0 |
| LnCAP A7 | 0.9 |
| LnCAP A8 | 0.4 |
| LnCAP A9 | 0.2 |
| LnCAP A10 | 0 |
| LnCAP A11 | 0.1 |
| LnCAP A12 | 0 |
| LnCAP A13 | 0.1 |
| LnCAP A14 | 0.1 |
| LnCAP A15 | 0.1 |
| LnCAP A16 | 0.1 |
| LnCAP A17 | 0.1 |
| Primary Astrocytes | 5.8 |
| Primary Renal Proximal | 14.5 |
| Tubule Epithelial cell A2 | |
| Primary melanocytes A5 | 0.3 |
| 126443 - 341 medullo | 0.2 |
| 126444 - 487 medullo | 2.1 |
| 126445 - 425 medullo | 0 |
| 126446 - 690 medullo | 1.9 |
| 126447 - 54 adult glioma | 2.5 |
| 126448 - 245 adult glioma | 11.7 |
| 126449 - 317 adult glioma | 12.1 |
| 126450 - 212 glioma | 0.8 |
| 126451 - 456 glioma | 2.3 |

### Example F10

### Expression and Therapeutic Relevance in Inflammatory Related Human Diseased and Normal Tissues

[0952] CG57094 acts as an apoptosis survival factor for vascular endothelial cells [Kim I, Kim H G, Kim H, Kim H H, Park S K, Uhm C S, Lee Z H, Koh G Y. Hepatic expression, synthesis and secretion of a novel fibrinogen/angiopoietin-related protein that prevents endothelial-cell apoptosis. Biochem J. Mar. 15, 2000;346 Pt 3:603-10]. Interestingly that epithelium cells and fibroblasts activated with proinflammatory cytokines as well as LAK cells expressed high levels of CG57094 mRNA. The above results suggest that CG57094 is an important regulator of inflammation. We used RTQ PCR to test expression of CG57094 mRNA in inflammatory tissues represented on AI comprehensive panel.

[0953] Description of AI_Comprehensive Panel_v1.0

[0954] The plates for AI_comprehensive panel_v1.0 include two control wells and 89 test samples comprised of cDNA isolated from surgical and postmortem human tissues obtained from the Backus Hospital and Clinomics (Frederick, Md.). Total RNA was extracted from tissue samples from the Backus Hospital in the Facility at CuraGen. Total RNA from other tissues was obtained from Clinomics.

[0955] Joint tissues including synovial fluid, synovium, bone and cartilage were obtained from patients undergoing total knee or hip replacement surgery at the Backus Hospital. Tissue samples were immediately snap frozen in liquid nitrogen to ensure that isolated RNA was of optimal quality and not degraded. Additional samples of osteoarthritis and rheumatoid arthritis joint tissues were obtained from Clinomics. Normal control tissues were supplied by Clinomics and were obtained during autopsy of trauma victims.

[0956] Surgical specimens of psoriatic tissues and adjacent matched tissues were provided as total RNA by Clinomics. Two male and two female patients were selected between the ages of 25 and 47. None of the patients were taking prescription drugs at the time samples were isolated.

[0957] Surgical specimens of diseased colon from patients with ulcerative colitis and Crohns disease and adjacent matched tissues were obtained from Clinomics. Bowel tissue from three female and three male Crohn's patients between the ages of 41-69 were used. Two patients were not on prescription medication while the others were taking dexamethasone, phenobarbital, or tylenol. Ulcerative colitis tissue was from three male and four female patients. Four of the patients were taking lebvid and two were on phenobarbital.

[0958] Total RNA from post mortem lung tissue from trauma victims with no disease or with emphysema, asthma or COPD was purchased from Clinomics. Emphysema patients ranged in age from 40-70 and all were smokers, this age range was chosen to focus on patients with cigarette-linked emphysema and to avoid those patients with alpha-1 anti-trypsin deficiencies. Asthma patients ranged in age from 36-75, and excluded smokers to prevent those patients that could also have COPD. COPD patients ranged in age from 35-80 and included both smokers and non-smokers. Most patients were taking corticosteroids, and bronchodilators.

[0959] In the labels employed to identify tissues in the AI_comprehensive panel_v1.0 panel, the following abbreviations are used:

[0960] AI=Autoimmunity

[0961] Syn=Synovial

[0962] Normal=No apparent disease

[0963] Rep22/Rep20=individual patients

[0964] RA=Rheumatoid arthritis

[0965] Backus=From Backus Hospital

[0966] OA=Osteoarthritis

[0967] (SS) (BA) (MF)=Individual patients

[0968] Adj=Adjacent tissue

[0969] Match control=adjacent tissues

[0970] —M=Male

[0971] —F=Female

[0972] COPD=Chronic obstructive pulmonary disease

[0973] Results.

[0974] CG57094, Angiopoeitin Related Protein, mRNA is clearly over expressed in tissues form osteoarthritis patients (CT=26-29). In addition ARP is expressed in moderate levels in rheumatoid arthritis, psoriasis, ulcer colitis, asthma, emphysema and Crohn's disease tissues. This indicate that the gene is involved in regulation of inflammation by possible promoting survival potentially harmfully cellular components such as T killer cells. Therefore therapeutic inhibition of this gene product, through the use of small molecule drugs or antibodies, might be of utility in the treatment of the above listed inflammatory diseases.

[image]

### Example F11

### Gene Expression Analysis using CuraChip in Human Tissues from Tumors and from Equivalent Normal Tissues

[0975] CuraGen has developed a gene microarray (CuraChip 1.2) for target identification. It provides a high-throughput means of global mRNA expression analyses of CuraGen's collection of cDNA sequences representing the Pharmaceutically Tractable Genome (PTG). This sequence set includes genes which can be developed into protein therapeutics, or used to develop antibody or small molecule therapeutics. CuraChip 1.2 contains ˜11,000 oligos representing approximately 8,500 gene loci, including (but not restricted to) kinases, ion channels, G-protein coupled receptors (GPCRs), nuclear hormone receptors, proteases, transporters, metabolic enzymes, hormones, growth factors, chemokines, cytokines, complement and coagulation factors, and cell surface receptors.

[0976] The CuraChip cDNAs were represented as 30-mer oligodeoxyribonucleotides (oligos) on a glass microchip. Hybridization methods using the longer CuraChip oligos are more specific compared to methods using 25-mer oligos. CuraChip oligos were synthesized with a linker, purified to remove truncated oligos (which can influence hybridization strength and specificity), and spotted on a glass slide. Oligo-dT primers were used to generate cRNA probes for hybridization from samples of interest. A biotin-avidin conjugation system was used to detect hybridized probes with a fluorophore-labeled secondary antibody. Gene expression was analyzed using clustering and correlation bioinformatics tools such as Spotfire® (Spotfire, Inc., 212 Elm Street, Somerville, Mass. 02144) and statistical tools such as multivariate analysis (MVA).

[0977] Normalization Method used in CuraChip Software

[0978] The median fluorescence intensity of each spot and a background for each spot is read on a scale from 0 to 65,000. CuraGen's CuraChip software, developed in-house, has the capability to present the user with either the raw data (median intensities) or normalized data. If normalized data is chosen, the CuraChip software uses the following method to do mean normalization. The normalization is based on each slide/experiment. Suppose we have:

[0979] fg_median is the signal/foreground median for each slide/experiment;

[0980] bg_median is the background median for each slide/experiment;

[0981] original_value is the difference between fg_median and bg_median;

[0982] flag is an indicator of a spot's success or failure, where 0 means success and 1 means failure;

[0983] raw_fg_mean is the raw foreground mean for each slide/experiment;

[0984] raw_bg_mean is the raw background mean for each slide/experiment;

[0985] trim_percentage is the trim percentage for each slide/experiment; this could be defined by the user; currently we are using 2% as the trim percentage for each slide/experiment;

[0986] nSpots is the number of spots on each slide;

[0987] nslides is the number of slides in each experiment;

[0988] fg_mean is the trimmed foreground mean for each slide/experiment;

[0989] bg_mean is the trimmed background mean for each slide/experiment;

[0990] max_fg_mean is a constant among all slides/experiments, currently 2200.0;

[0991] normalized_value is the final normalized value;

[0992] coeff is the normalization co-efficient;

[0993] MAX_VALUE is a constant representing the highest possible fluorescence reading, currently 65,000.

[0994] Step 1. Calculate Trimmed Foreground and Background Means

[0995] For each slide/experiment, we first calculate the trimmed foreground mean and the trimmed background mean of all spots, suppose nSpots, on each slide. For each spot, if the data is acceptable (flag=0), we calculate the raw foreground mean and background mean by subtracting the background median from the foreground median for each spot. This is designated as a spot's “original value”. (Note: If flag=1, all values are set to 0.)

| original_value = fg_median - bg_median; | |
|---|---|
| if (flag = = 0) | // experiment is successful |
| { | |
| raw_fg_mean = original_value; | |
| raw_bg_mean = bg_median; | |
| } | |
| else | // experiment is failed |

{
raw_fg_mean = 0.0;

raw_bg_mean= 0.0;

}

[0996] After that, we remove (trim) the top and bottom 2% of data points from the data set. After the above calculation, we have nSpot number of foreground means and background means for each slide/experiment, and both lists are sorted. Suppose we have the following sorted lists:

| | |
|---|---|
| raw_fg_mean[1], raw_fg_mean[2], ..., | N = 1, nSpots; |
| raw_fg_mean[N]; | |
| raw_bg_mean[1], raw_bg_mean [2], ..., | N = 1, nSpots; |
| raw_bg_mean[N]; | |

[0997] then we calculate the trimmed data points for each slide/experiment. Suppose a is the trimmed start data point and b is the trimmed end data point, we have:

a = ceil(nSpots * trim_percentage);
b = floor(nSpots * (1 - trim_percentage);

[0998] The “background mean” is calculated from the background medians for the trimmed data set. For the background mean, we simply calculate the average background mean in interval [a, b] then assign to bg_mean:

bg_mean = (raw_bg_mean[a] + raw_bg_{—}
mean[a+1] +...+ raw_bg_mean[b])/(b-

a+1);

[0999] The “foreground mean” is calculated from the “original values” (i.e. background-subtracted spot signal medians); only “original values” greater than 500 are used for this calculation (excluding the trimmed top and bottom 2% of the data). Suppose the sum of those foreground means is sum_raw_fg_mean and the amount of those foreground means is k.

fg_mean = sum_raw_fg_mean / k;

[1000] For clarity, a snippet code in Java looks like the following,

| | |
|---|---|
| int | k = 0; |
| double | sum_raw_fg_mean = 0.0; |

for (int j = a; j < b; j++) {

if ( raw_fg_mean[j] > 500 ) {

sum_raw_fg_mean = sum_raw_fg_mean +
raw_fg_mean[j];
k++;
}

}

fg_mean = sum_raw_fg_mean / k;

[1001] After the calculation of trimmed foreground means and background means for all slides is complete, we start our normalization procedure.

[1002] Step 2. Normalize Data

[1003] For each slide a normalization coefficient is calculated which compares the foreground mean of the slide to a fixed maximum foreground mean (2200). This coefficient is:

coeff = max_fg_mean / fg_mean;

[1004] The normalized value of each spot is then calculated by multiplying the spot's “original value” by the normalization coefficient. Note that if this value is greater than the maximum reading of 65,000, then the value of 65,000 is used as the normalized value. Also note that if a spot's “original value” is less than the background value, the background value is used.

Recall that original_value = fg_median - bg_median
if ( original_value > bg_mean ) {
normalized_value = min(coeff * original_value, MAX_VALUE);
} else {
normalized_value = coeff*bg_mean;
}

[1005] The normalized_value for each spot is the final (normalized) value used in the analysis

### Example F12

### Threshhold for CuraChip Data Analysis

[1006] A number of control spots are present on CuraChip 1.2 for efficiency calculations and to provide alternative normalization methods. For example, CuraChip 1.2 contains a number of empty or negative control spots, as well as positive control spots containing a dilution series of oligos that detect the highly-expressed genes Ubiquitin and glyceraldehyde-3-phosphate dehydrogenase (GAPD). An analysis of spot signal level was performed using raw data from 67 hybridizations using all oligos. The maximum signal intensity for each oligo across all 67 hybridizations was determined, and the fold-over-background for this maximum signal was calculated (i.e. if the background reading is 20 and the raw spot intensity is 100, then the fold-over-background for that spot is 5×). The negative control or empty spots do occasionally “fire” or give a signal over the background level; however, they do not fire very strongly, with 77.1% of empty spots firing <3× over background and 91.7% <5× (see burgundy bars in figure below). The positive control spots (Ubiquitin and GAPD, the light blue and dark blue bars, respectively) always fired at >100× background. The experimental oligos (Curaoligos, in yellow below) fired over the entire range of intensities, with some at low fold-over-background intensities. Since the negative control spots do fire occasionally at low levels, we have set a suggested threshhold for data analysis at >5× background.

[image]

[1007] Results of PTG Chip 1.2:

[1008] One hundred seventy-eight samples of RNA from tissues obtained from surgically dissected tumors, non-diseased tissues from the corresponding organs and tumor xenografts grown in nude nu/nu mices were used to generate probes and run on PTG Chip 1.2. An oligo (optg2_{—}0010188) that corresponds to CG57094 on the PTG Chip 1.2 was scrutinized for its expression profile. The statistical analysis identify significant over-expression in a subset of lung tumors compared with corresponding normal lung tissue and strong expression in melanomas and breast cancers, which do not have matched normal tissue

[1009] Thus, based upon its profile, the expression of this gene could be of use as a marker for subsets of lung, melanomas and breast cancers, in addition to the subset of Kidney cancers as previously disclosed. In addition, therapeutic inhibition of the activity of the product of this gene, through the use of antibodies or small molecule drugs, may be useful in the therapy of kidney, lung, melanomas and breast cancers that express CG57094 and are dependent on them

ptg2 0010188 Oligo Sequence:
>ATCTGGAAACTTGTGGACAGAGAAGAAGAC (SEQ ID NO:393)

[1010] [image] TABLE F12c

| Tissue | Tissue | absolute | Foreground | background |
|---|---|---|---|---|
| Definition | ID | value | Mean | mean |
| G1C4D21B11- | 1 | 133.57 | 2536.51 | 22.17 |
| 01_Lung | | | | |
| cancer(35C) | | | | |
| G1C4D21B11- | 2 | 24.15 | 2733.37 | 20.31 |
| 02_Lung | | | | |
| NAT(36A) | | | | |
| G1C4D21B11- | 3 | 75 | 2933.33 | 21.31 |
| 03_Lung | | | | |
| cancer(35E) | | | | |
| G1C4D21B11- | 4 | 30.62 | 3808.15 | 19.58 |
| 04_Lung | | | | |
| cancer(365) | | | | |
| G1C4D21B11- | 5 | 67.59 | 3824.5 | 21.07 |
| 05_Lung | | | | |
| cancer(368) | | | | |
| G1C4D21B11- | 6 | 23.36 | 2825.08 | 18.76 |
| 06_Lung | | | | |
| cancer(369) | | | | |
| G1C4D21B11- | 7 | 96.15 | 4152.87 | 26.78 |
| 07_Lung | | | | |
| cancer(36E) | | | | |
| G1C4D21B11- | 8 | 44.14 | 3538.73 | 23.55 |
| 08_Lung | | | | |
| NAT(36F) | | | | |
| G1C4D21B11- | 9 | 38.76 | 4143.89 | 21.18 |
| 09_Lung | | | | |
| cancer(370) | | | | |
| G1C4D21B11- | 10 | 18.71 | 2446.38 | 20.81 |
| 10_Lung | | | | |
| cancer(376) | | | | |
| G1C4D21B11- | 11 | 89.32 | 3989.95 | 27.35 |
| 11_Lung | | | | |
| cancer(378) | | | | |
| G1C4D21B11- | 12 | 50.79 | 4136.72 | 36.64 |
| 12_Lung | | | | |
| cancer(37A) | | | | |
| G1C4D21B11- | 13 | 15.33 | 4083.27 | 28.46 |
| 13_Normal | | | | |
| Lung 4 | | | | |
| G1C4D21B11- | 14 | 30.65 | 4235.38 | 25.22 |
| 14_Normal | | | | |
| Lung 5 | | | | |
| G1C4D21B11- | 15 | 70.81 | 3728.44 | 28.62 |
| 15_CuraChip | | | | |
| reference 1 | | | | |
| G1C4D21B11- | 16 | 157.33 | 2915.57 | 20.5 |
| 16_5.Melanoma | | | | |
| G1C4D21B11- | 17 | 217.38 | 2646.56 | 20.29 |
| 17_6.Melanoma | | | | |
| G1C4D21B11- | 18 | 79.79 | 2509.13 | 23.23 |
| 18_Melanoma | | | | |
| (19585) | | | | |
| G1C4D21B11- | 19 | 51.02 | 2759.91 | 24.22 |
| 19_Normal | | | | |
| Lung 1 | | | | |
| G1C4D21B11- | 20 | 128.42 | 3803.04 | 27.08 |
| 20_Lung | | | | |
| cancer(372) | | | | |
| G1C4D21B11- | 21 | 16.91 | 3771.95 | 25.68 |
| 21_Lung | | | | |
| NAT(35D) | | | | |
| G1C4D21B11- | 22 | 55.63 | 2214.53 | 20.77 |
| 22_Lung | | | | |
| NAT(361) | | | | |
| G1C4D21B11- | 23 | 22.08 | 2134.94 | 21.43 |
| 23_{—} | | | | |
| 1.Melanoma | | | | |
| G1C4D21B11- | 24 | 15.95 | 3656.2 | 20.99 |
| 24_Normal | | | | |
| Lung 2 | | | | |
| G1C4D21B11- | 25 | 234.35 | 3295.08 | 24.19 |
| 25_Lung | | | | |
| cancer(374) | | | | |
| G1C4D21B11- | 26 | 30.3 | 3776.14 | 21.32 |
| 26_Lung | | | | |
| cancer(36B) | | | | |
| G1C4D21B11- | 27 | 37.68 | 1543.94 | 26.44 |
| 27_Lung | | | | |
| cancer(362) | | | | |
| G1C4D21B11- | 28 | 145.95 | 1929.4 | 30.01 |
| 28_Lung | | | | |
| cancer(358) | | | | |
| G1C4D21B11- | 29 | 84.73 | 2375.7 | 20.83 |
| 29_{—} | | | | |
| 2.Melanoma | | | | |
| G1C4D21B11- | 30 | 21.6 | 3157.31 | 22.69 |
| 30_Normal | | | | |
| Lung 3 | | | | |
| G1C4D21B11- | 31 | 153.99 | 4614.72 | 32.86 |
| 31_Lung | | | | |
| NAT(375) | | | | |
| G1C4D21B11- | 32 | 242.45 | 2785.76 | 24.74 |
| 32_Lung | | | | |
| cancer(36D) | | | | |
| G1C4D21B11- | 33 | 17.31 | 4348.91 | 34.21 |
| 33_Lung | | | | |
| NAT(363) | | | | |
| G1C4D21B11- | 34 | 21.52 | 3986.34 | 29.19 |
| 34_Lung | | | | |
| cancer(35A) | | | | |
| G1C4D21B11- | 35 | 200.47 | 2189.36 | 20.44 |
| 35_{—} | | | | |
| 4.Melanoma | | | | |
| G1C4E09B12- | 36 | 18.97 | 2957.66 | 9.6 |
| 54_Prostate | | | | |
| cancer(B8B) | | | | |
| G1C4E09B12- | 37 | 17.73 | 4126.76 | 33.25 |
| 55_Prostate | | | | |
| cancer(B88) | | | | |
| G1C4E09B12- | 38 | 24.69 | 3378.81 | 37.92 |
| 56_Prostate | | | | |
| NAT(B93) | | | | |
| G1C4E09B12- | 39 | 26.54 | 3527 | 42.55 |
| 57_Prostate | | | | |
| cancer(B8C) | | | | |
| G1C4E09B12- | 40 | 24.3 | 4105.44 | 45.35 |
| 58_Prostate | | | | |
| cancer(AD5) | | | | |
| G1C4E09B12- | 41 | 21.87 | 4196.5 | 41.71 |
| 59_Prostate | | | | |
| NAT(AD6) | | | | |
| G1C4E09B12- | 42 | 33.21 | 2830.59 | 42.73 |
| 60_Prostate | | | | |
| cancer(AD7) | | | | |
| G1C4E09B12- | 43 | 19.21 | 3404.14 | 29.72 |
| 61_Prostate | | | | |
| NAT(AD8) | | | | |
| G1C4E09B12- | 44 | 20.54 | 3700.09 | 34.54 |
| 62_Prostate | | | | |
| cancer(ADA) | | | | |
| G1C4E09B12- | 45 | 22.51 | 3022.26 | 30.92 |
| 63_Prostate | | | | |
| NAT(AD9) | | | | |
| G1C4E09B12- | 46 | 21.74 | 3084.26 | 30.48 |
| 64_Prostate | | | | |
| cancer(9E7) | | | | |
| G1C4E09B12- | 47 | 13.57 | 3983.11 | 24.56 |
| 66_Prostate | | | | |
| cancer(A0A) | | | | |
| G1C4E09B12- | 48 | 18.23 | 2889.43 | 23.94 |
| 67_Prostate | | | | |
| cancer(9E2) | | | | |
| G1C4E09B12- | 49 | 13.28 | 4473.72 | 23.53 |
| 68_Pancreatic | | | | |
| cancer(9E4) | | | | |
| G1C4E09B12- | 50 | 12.94 | 3443.44 | 20.25 |
| 69_Pancreatic | | | | |
| cancer(9D8) | | | | |
| G1C4E09B12- | 51 | 20.74 | 3819.27 | 17.3 |
| 70_Pancreatic | | | | |
| cancer(9D4) | | | | |
| G1C4E09B12- | 52 | 23.76 | 3287.48 | 24.17 |
| 71_Pancreatic | | | | |
| cancer(9BE) | | | | |
| G1C4E09B12- | 53 | 41.05 | 2358 | 28.92 |
| 73_Pancreatic | | | | |
| NAT(ADB) | | | | |
| G1C4E09B12- | 54 | 28.39 | 2863.88 | 36.96 |
| 74_Pancreatic | | | | |
| NAT(ADC) | | | | |
| G1C4E09B12- | 55 | 21.32 | 3118.81 | 30.22 |
| 76_Pancreatic | | | | |
| NAT(ADD) | | | | |
| G1C4E09B12- | 56 | 18.02 | 3211.96 | 26.31 |
| 77_Pancreatic | | | | |
| NAT(AED) | | | | |
| G1C4E19B13- | 57 | 53.27 | 1984.83 | 48.06 |
| 1_Colon | | | | |
| cancer(8A3) | | | | |
| G1C4E19B13- | 58 | 51.6 | 1682.5 | 39.46 |
| 10_Colon | | | | |
| NAT(8B6) | | | | |
| G1C4E19B13- | 59 | 45.13 | 2378.93 | 48.8 |
| 12_Colon | | | | |
| NAT(9F1) | | | | |
| G1C4E19B13- | 60 | 52.51 | 1931.28 | 46.1 |
| 13_Colon | | | | |
| cancer(9F2) | | | | |
| G1C4E19B13- | 61 | 49.92 | 2029.41 | 46.05 |
| 14_Colon | | | | |
| NAT(A1D) | | | | |
| G1C4E19B13- | 62 | 42.55 | 2278.96 | 44.08 |
| 15_Colon | | | | |
| cancer(9DB) | | | | |
| G1C4E19B13- | 63 | 59.68 | 1674.01 | 45.41 |
| 16_Colon | | | | |
| NAT(A15) | | | | |
| G1C4E19B13- | 64 | 56.64 | 1360.97 | 35.04 |
| 17_Colon | | | | |
| cancer(A14) | | | | |
| G1C4E19B13- | 65 | 58.01 | 1707.6 | 45.03 |
| 18_Colon | | | | |
| NAT(ACB) | | | | |
| G1C4E19B13- | 66 | 53.49 | 1894.33 | 46.06 |
| 19_Colon | | | | |
| cancer(AC0) | | | | |
| G1C4E19B13- | 67 | 53.4 | 1785.56 | 43.34 |
| 2_Colon | | | | |
| cancer(8A4) | | | | |
| G1C4E19B13- | 68 | 53.97 | 1797.75 | 44.1 |
| 20_Colon | | | | |
| NAT(ACD) | | | | |
| G1C4E19B13- | 69 | 49.29 | 2198.75 | 49.26 |
| 21_Colon | | | | |
| cancer(AC4) | | | | |
| G1C4E19B13- | 70 | 52.18 | 1847.84 | 43.83 |
| 22_Colon | | | | |
| NAT(AC2) | | | | |
| G1C4E19B13- | 71 | 48.1 | 1806.35 | 39.49 |
| 23_Colon | | | | |
| cancer(AC1) | | | | |
| G1C4E19B13- | 72 | 42.7 | 2013.34 | 39.08 |
| 24_Colon | | | | |
| NAT(ACC) | | | | |
| G1C4E19B13- | 73 | 68.18 | 1539.46 | 47.71 |
| 25_Colon | | | | |
| cancer(AC3) | | | | |
| G1C4E19B13- | 74 | 55.27 | 1857.03 | 46.65 |
| 26_Breast | | | | |
| cancer(9B7) | | | | |
| G1C4E19B13- | 75 | 71.21 | 1462.79 | 47.35 |
| 27_Breast | | | | |
| NAT(9CF) | | | | |
| G1C4E19B13- | 76 | 49.21 | 2133.12 | 47.71 |
| 28_Breast | | | | |
| cancer(9B6) | | | | |
| G1C4E19B13- | 77 | 47.76 | 2302.99 | 47.48 |
| 29_Breast | | | | |
| cancer(9C7) | | | | |
| G1C4E19B13- | 78 | 47.69 | 2093.72 | 45.39 |
| 3_Colon | | | | |
| cancer(8A6) | | | | |
| G1C4E19B13- | 79 | 66.26 | 1508.35 | 45.43 |
| 30_Breast | | | | |
| NAT(A11) | | | | |
| G1C4E19B13- | 80 | 45.59 | 2246.51 | 46.55 |
| 31_Breast | | | | |
| cancer(A1A) | | | | |
| G1C4E19B13- | 81 | 54.43 | 1881.09 | 46.54 |
| 32_Breast | | | | |
| cancer(9F3) | | | | |
| G1C4E19B13- | 82 | 49.23 | 2174.46 | 48.66 |
| 33_Breast | | | | |
| cancer(9B8) | | | | |
| G1C4E19B13- | 83 | 64.44 | 1670.58 | 48.93 |
| 34_Breast | | | | |
| NAT(9C4) | | | | |
| G1C4E19B13- | 84 | 44.47 | 1168.07 | 23.61 |
| 35_Breast | | | | |
| cancer(9EF) | | | | |
| G1C4E19B13- | 85 | 41.67 | 1506.95 | 28.54 |
| 36_Breast | | | | |
| cancer(9F0) | | | | |
| G1C4E19B13- | 86 | 70.07 | 1016.05 | 32.36 |
| 37_Breast | | | | |
| cancer(9B4) | | | | |
| G1C4E19B13- | 87 | 47.02 | 2526.83 | 47.27 |
| 38_Breast | | | | |
| cancer(9EC) | | | | |
| G1C4E19B13- | 88 | 66.52 | 1594.35 | 48.21 |
| 4_Colon | | | | |
| cancer(8A7) | | | | |
| G1C4E19B13- | 89 | 42.75 | 2091.33 | 40.64 |
| 44_Colon | | | | |
| cancer(8B7) | | | | |
| G1C4E19B13- | 90 | 35.31 | 2533.34 | 40.66 |
| 5_Colon | | | | |
| cancer(8A9) | | | | |
| G1C4E19B13- | 91 | 41.11 | 1638.43 | 30.62 |
| 6_Colon | | | | |
| cancer(8AB) | | | | |
| G1C4E19B13- | 92 | 46.1 | 1975.26 | 41.39 |
| 7_Colon | | | | |
| cancer(8AC) | | | | |
| G1C4E19B13- | 93 | 58.49 | 1851.09 | 49.21 |
| 8_Colon | | | | |
| NAT(8AD) | | | | |
| G1C4E19B13- | 94 | 53.98 | 1920.15 | 47.11 |
| 9_Colon | | | | |
| cancer(8B5) | | | | |
| G1C4E21B14- | 95 | 3.19 | 1393.31 | 2.02 |
| 1_Cervical | | | | |
| cancer(B08) | | | | |
| G1C4E21B14- | 96 | 13.92 | 1400.44 | 8.86 |
| 10_Brain | | | | |
| cancer(9F8) | | | | |
| G1C4E21B14- | 97 | 15.88 | 655.35 | 4.73 |
| 11_Brain | | | | |
| cancer(9C0) | | | | |
| G1C4E21B14- | 98 | 0.66 | 1403.07 | 0.42 |
| 12_Brain | | | | |
| cancer(9F7) | | | | |
| G1C4E21B14- | 99 | 4.74 | 1509.09 | 3.25 |
| 13_Brain | | | | |
| cancer(A00) | | | | |
| G1C4E21B14- | 100 | 0.82 | 1159.94 | 0.43 |
| 14_Brain | | | | |
| NAT(A01) | | | | |
| G1C4E21B14- | 101 | 1.55 | 1019.67 | 0.72 |
| 15_Brain | | | | |
| cancer(9DA) | | | | |
| G1C4E21B14- | 102 | 4.5 | 1352.85 | 2.77 |
| 16_Brain | | | | |
| cancer(9FE) | | | | |
| G1C4E21B14- | 103 | 6.17 | 1237.61 | 3.47 |
| 17_Brain | | | | |
| cancer(9C6) | | | | |
| G1C4E21B14- | 104 | 5.2 | 917.48 | 2.17 |
| 18_Brain | | | | |
| cancer(9F6) | | | | |
| G1C4E21B14- | 105 | 4.36 | 826.9 | 1.64 |
| 2_Cervical | | | | |
| NAT(AEB) | | | | |
| G1C4E21B14- | 106 | 1.86 | 521.75 | 0.44 |
| 21_Bladder | | | | |
| NAT(23954) | | | | |
| G1C4E21B14- | 107 | 3.06 | 1007.77 | 1.4 |
| 22_Urinary | | | | |
| cancer(AF6) | | | | |
| G1C4E21B14- | 108 | 2.29 | 1256.43 | 1.31 |
| 23_Urinary | | | | |
| cancer(B0C) | | | | |
| G1C4E21B14- | 109 | 2.22 | 1219.17 | 1.23 |
| 24_Urinary | | | | |
| cancer(AE4) | | | | |
| G1C4E21B14- | 110 | 2.21 | 1222.48 | 1.23 |
| 25_Urinary | | | | |
| NAT(B20) | | | | |
| G1C4E21B14- | 111 | 2.03 | 1114.91 | 1.03 |
| 26_Urinary | | | | |
| cancer(AE6) | | | | |
| G1C4E21B14- | 112 | 0.23 | 655.35 | 0.07 |
| 27_Urinary | | | | |
| NAT(B04) | | | | |
| G1C4E21B14- | 113 | 6.64 | 543.73 | 1.64 |
| 28_Urinary | | | | |
| cancer(B07) | | | | |
| G1C4E21B14- | 114 | 0.93 | 1247.4 | 0.53 |
| 29_Urinary | | | | |
| NAT(AF8) | | | | |
| G1C4E21B14- | 115 | 6.72 | 1411.18 | 4.31 |
| 3_Cervical | | | | |
| cancer(AFF) | | | | |
| G1C4E21B14- | 116 | 1.13 | 1221.47 | 0.63 |
| 30_Ovarian | | | | |
| cancer(9D7) | | | | |
| G1C4E21B14- | 117 | 2.51 | 1138.73 | 1.3 |
| 31_Urinary | | | | |
| cancer(AF7) | | | | |
| G1C4E21B14- | 118 | 0 | 1298.98 | 0 |
| 32_Ovarian | | | | |
| cancer(9F5) | | | | |
| G1C4E21B14- | 119 | 4.19 | 1134.77 | 2.16 |
| 33_Ovarian | | | | |
| cancer(A05) | | | | |
| G1C4E21B14- | 120 | 0.65 | 505 | 0.15 |
| 34_0varian | | | | |
| cancer(9BC) | | | | |
| G1C4E21B14- | 121 | 2 | 1025.23 | 0.93 |
| 35_Ovarian | | | | |
| cancer(9C2) | | | | |
| G1C4E21B14- | 122 | 2.8 | 1203.34 | 1.53 |
| 36_Ovarian | | | | |
| cancer(9D9) | | | | |
| G1C4E21B14- | 123 | 1.73 | 685.35 | 0.54 |
| 37_Ovarian | | | | |
| NAT(AC7) | | | | |
| G1C4E21B14- | 124 | 2.61 | 716.79 | 0.85 |
| 38_Ovarian | | | | |
| NAT(AC9) | | | | |
| G1C4E21B14- | 125 | 8.33 | 628.62 | 2.38 |
| 39_Ovarian | | | | |
| NAT(ACA) | | | | |
| G1C4E21B14- | 126 | 11.93 | 1293.21 | 7.01 |
| 4_Cervical | | | | |
| NAT(B1E) | | | | |
| G1C4E21B14- | 127 | 4.02 | 542.12 | 0.99 |
| 40_Ovarian | | | | |
| NAT(AC5) | | | | |
| G1C4E21B14- | 128 | 14.43 | 1512.53 | 9.92 |
| 5_Cervical | | | | |
| cancer(B00) | | | | |
| G1C4E21B14- | 129 | 16.96 | 1136.08 | 8.76 |
| 6_Cervical | | | | |
| NAT(AFA) | | | | |
| G1C4E21B14- | 130 | 23.4 | 1782.82 | 18.96 |
| 7_Cervical | | | | |
| cancer(B1F) | | | | |
| G1C4E21B14- | 131 | 7.92 | 655.35 | 2.36 |
| 8_Cervical | | | | |
| NAT(B1C) | | | | |
| G1C4E21B14- | 132 | 7.41 | 1508.5 | 5.08 |
| 9_Brain | | | | |
| cancer(9F9) | | | | |
| G1C4E23B15- | 133 | 103.28 | 2470.88 | 0 |
| 32_Breast | | | | |
| cancer(D34) | | | | |
| G1C4E23B15- | 134 | 0 | 2602.08 | 0 |
| 33_Breast | | | | |
| cancer(D35) | | | | |
| G1C4E23B15- | 135 | 152.74 | 2909.53 | 0 |
| 34_Breast | | | | |
| cancer(D36) | | | | |
| G1C4E23B15- | 136 | 52.81 | 2811.77 | 0.05 |
| 35_Breast | | | | |
| cancer(D37) | | | | |
| G1C4E23B15- | 137 | 8.84 | 2986.78 | 0.38 |
| 36_Breast | | | | |
| cancer(D38) | | | | |
| G1C4E23B15- | 138 | 0.03 | 3026.22 | 0.04 |
| 37_Breast | | | | |
| cancer(D39) | | | | |
| G1C4E23B15- | 139 | 27.92 | 3072.62 | 0.08 |
| 38_Breast | | | | |
| cancer(D3A) | | | | |
| G1C4E23B15- | 140 | 0.86 | 2571.28 | 0.02 |
| 39_Breast | | | | |
| cancer(D3B) | | | | |
| G1C4E23B15- | 141 | 0.41 | 3213.98 | 0.6 |
| 40_Breast | | | | |
| cancer(D3C) | | | | |
| G1C4E23B15- | 142 | 40.41 | 3484.57 | 2.5 |
| 41_Breast | | | | |
| cancer(D3D) | | | | |
| G1C4E23B15- | 143 | 28.26 | 2958.51 | 0.17 |
| 42_Breast | | | | |
| cancer(D3E) | | | | |
| G1C4E23B15- | 144 | 1.41 | 2937.01 | 1.88 |
| 43_Breast | | | | |
| cancer(D3F) | | | | |
| G1C4E23B15- | 145 | 0.96 | 2751.61 | 1.2 |
| 44_Breast | | | | |
| cancer(D40) | | | | |
| G1C4E23B15- | 146 | 0.81 | 2171.59 | 0.8 |
| 45_Breast | | | | |
| cancer(D42) | | | | |
| G1C4E23B15- | 147 | 43.82 | 2962.09 | 4.5 |
| 46_Breast | | | | |
| cancer(D43) | | | | |
| G1C4E23B15- | 148 | 56.05 | 2551.3 | 3.02 |
| 47_Breast | | | | |
| cancer(D44) | | | | |
| G1C4E23B15- | 149 | 28.87 | 2667.3 | 3.59 |
| 48_Breast | | | | |
| cancer(D45) | | | | |
| G1C4E30B16- | 150 | 21.18 | 2804.32 | 0.56 |
| 1_2.SK-MES | | | | |
| G1C4E30B16- | 151 | 0 | 3402.37 | 0 |
| 10_40.HLaC-79 | | | | |
| G1C4E30B16- | 152 | 28.33 | 2562.59 | 0 |
| 11_43.H226 | | | | |
| G1C4E30B16- | 153 | 300.16 | 4221.68 | 0.09 |
| 12_45.HCT-116 | | | | |
| G1C4E30B16- | 154 | 38.67 | 3243.07 | 0 |
| 13_53.IGROV-1 | | | | |
| G1C4E30B16- | 155 | 54.09 | 3253.75 | 0 |
| 14_59.MX-1 | | | | |
| G1C4E30B16- | 156 | 0 | 3249.59 | 0 |
| 15_63.C33A | | | | |
| G1C4E30B16- | 157 | 0.01 | 2333.08 | 0.01 |
| 16_65.Daudi | | | | |
| G1C4E30B16- | 158 | 0.76 | 2727.71 | 0.94 |
| 17_71.MV522 | | | | |
| G1C4E30B16- | 159 | 0 | 2906.49 | 0 |
| 18_76.RWP-2 | | | | |
| G1C4E30B16- | 160 | 7.91 | 2502.53 | 0.01 |
| 19_77.BON | | | | |
| G1C4E30B16- | 161 | 123.89 | 3604.78 | 0 |
| 2_6.MiaPaCa | | | | |
| G1C4E30B16- | 162 | 2.04 | 2357.18 | 2.19 |
| 20_82.H82 | | | | |
| G1C4E30B16- | 163 | 0.1 | 2759.55 | 0.12 |
| 21_86.H69 | | | | |
| G1C4E30B16- | 164 | 0 | 2687.93 | 0 |
| 22_95.Caki-2 | | | | |
| G1C4E30B16- | 165 | 47.91 | 3352.46 | 0.41 |
| 23_100.LNCaP | | | | |
| G1C4E30B16- | 166 | 95.02 | 2593.12 | 0 |
| 24_101.A549 | | | | |
| G1C4E30B16- | 167 | 37.12 | 3970.51 | 0.07 |
| 25_1. DU145 | | | | |
| G1C4E30B16- | 168 | 41.54 | 3230.65 | 0.14 |
| 26_6. OVCAR-3 | | | | |
| G1C4E30B16- | 169 | 0.05 | 3381.64 | 0.07 |
| 27_11. HT-29 | | | | |
| G1C4E30B16- | 170 | 0.15 | 3610.05 | 0.24 |
| 28_13. DLD-2 | | | | |
| G1C4E30B16- | 171 | 9.59 | 3326.73 | 1.78 |
| 29_18. MCF-7 | | | | |
| G1C4E30B16- | 172 | 6.25 | 2464.22 | 0 |
| 3_9.H460 | | | | |
| G1C4E30B16- | 173 | 0 | 2732.11 | 0 |
| 4_15.SW620 | | | | |
| G1C4E30B16- | 174 | 628.79 | 3519.75 | 0 |
| 5_20.SK-OV-3 | | | | |
| G1C4E30B16- | 175 | 24.13 | 3464.04 | 0.04 |
| 6_23.MDA-231 | | | | |
| G1C4E30B16- | 176 | 360.24 | 3801.64 | 0 |
| 7_27.Caki-1 | | | | |
| G1C4E30B16- | 177 | 0 | 2214.23 | 0 |
| 8_31.PC-3 | | | | |
| G1C4E30B16- | 178 | 24.46 | 3237.95 | 0 |
| 9_35.LoVo | | | | |

### Example F13

### Subcloning and Protein Expression

[1011] CG57094 encodes a protein consisting of a signal peptide followed by a coil-coil-like domain (required for oligomerization) followed by a fibrinogen-like domain (required for binding to the receptor). Only the mature region of this protein was expressed (removing the signal peptide and substituting it with a IgKappa signal peptide) because the full length sequence with its own signal peptide did not express and secrete sufficient amount. Two recombinant sequences were made, CG57094-02 and CG57094-04 as described in methods, for expression in mammalian system

### Example F14

### Expression of CG57094-04 in Human Embryonic Kidney 293 Cells

[1012] A 1143 bp long BglII-XhoI fragment containing the CG57094-04 sequence was subcloned into BamHI-XhoI digested pCEP4/Sec to generate plasmid 789. The resulting plasmid 789 was transfected into 293 cells using the LipofectaminePlus reagent following the manufacturer's instructions (Invitrogen/Gibco). The cell pellet and supernatant were harvested 72h post transfection and examined for CG57094-04 expression by Western blot (reducing conditions) using an anti-V5 antibody. The gel below shows that CG57094-04 is expressed, and a 35 kDa protein is secreted by 293 cells.

[1013] The transient 293 transfection was scaled up yielding 6 L conditioned media, from each scale up, providing material for batches 3 and 4.

[image]

### Example F15

### Expression of CG57094-02 in Stable CHO—K1 Cells

[1014] A 1143 bp long BglII-XhoI fragment containing the CG57094-02 sequence was subcloned into BamHI-XhoI digested pEE14.4 Sec to generate plasmid 1614. The resulting plasmid 1614 was transfected into CHO—K1 cells using the LipofectaminePlus reagent following the manufacturer's instructions (Invitrogen/Gibco). The cell pellet and supernatant were harvested 72 h post transfection and examined for CG57094-02 expression by Western blot (reducing conditions) using an anti-V5 antibody. The gel below shows that CG57094-02 is expressed, and a 33 kDa protein is secreted by the CHO—K1 cells at transient level.

[1015] The culture media was DMEM, 10% FBS, 1× nonessential amino acids.

[image]

[1016] MSX resistant clones were selected using the GS system (Lonza Biologicals) The culture media in the selection process was: Glutamin-free DMEM (JRH), 10% dialyzed FBS, 1× GS supplement (JRH), 25 uM MSX (JRH).

[1017] A high expressor clone, was selected for scale up in 10 LWave bioreactors. Two reactors were inoculated. 30 L conditioned media was collected from each reactors yielding batches 2 and 3.

[1018] The culture media was harvested 120 h after inoculating the Wave bioreactor and examined for CG57094-04 expression by Western blot (reducing conditions) using an anti-V5 antibody. The gel below represents the Western analysis of the sample.

[image]

[1019] The protein secreted as the predicted, 45 kDa molecule.

[1020] The culture media in the Wave bioreactor is: EX-Cell302 media, 10% dialyzed FBS, 1× GS supplement, 1× HT supplement, 25 uM MSX.

[1021] The difference between the observed molecular weight of the secreted molecule in the transient and in the stable cell line scale up conditions is most likely a consequence of the different culture media used in the two production schemes.

### Example F16

### Protein Expression and Purification

[1022] CG57094 variant 02 was expressed and purified in the CHO stable cell system. This method yields both full length protein (around 54 Kd) and a proteolityc fragment of 35 Kd, with a ration of about 1:2 full length/fragment. In non reducing conditions (As seen in the western blot), the full length undergoes oligomerization CG57094 variant 04, that has the same protein sequence as 02, was expressed and purified in the 293 transient cell system. More than 90% of the protein is purified as a proteolitic fragment and thefore does not undergo oligomerization.

[1023] Procedure

[1024] 1. Transfected into attached CHO stable cells with Lipofectamine 2000 in Opti-MEM 1. Overlay with DMEM media with 5% FBS after 4 hours.

[1025] 2. Harvested after 3, 5 and 7 days incubation at 37° C.

[1026] Cell Lysis/Protein Recovery

[1027] Procedure

[1028] 1. Centrifuged at 3000 rpm for 10 min and filter with 0.2 um pore size.

[1029] Procedure

[1030] 1. Metal Affinity Chromatography—Pharmacia 50ml and 5 ml Metal Chelate—Running buffer 20 mM phosphate, pH 7.4, 0.5 M NaCl. Wash with 20 mM, 50 mM, and 100 mM Imidazole. Elute with 500 mM Imidazole.

[1031] 2. HS Cation Exchange Chromatography—Poros HS 1.6 ml column—30 mM Tris-Cl, pH 8.0, 0.05% CHAPS. Elute with 0-2 M NaCl gradient.

[1032] 3. Dialysis—@ 4° C. using 3,500 MWCO against 20 mM Tris-HCl, pH7.4+150 mM NaCl.

[1033] Protein Quality Control

[1034] Western Blot Procedure

[1035] Antibody name, catalog # and supplier: Anti-V5-HRP Antibody, 46-0708, Invitrogen (Carlsbad, Calif.), S-protein HRP conjugate, 69047, Novagen (Madison, Wis.)

[1036] Antibody dilution buffer: PBS/5% milk/0.1% Tween-20

[1037] Wash buffer: PBS/0.1% Tween-20

[1038] Detection reagents: ECL (Amersham Biosciences Corp., Piscataway, N.J.)

[1039] 1. The blot was covered with antibody dilution buffer and incubated on a rocker for one hour at room temperature.

[1040] 2. The blocking solution was replaced with antibody dilution buffer containing the appropriate amount of conjugate, and the blot was incubated on a rocking platform for one hour at room temperature.

[1041] 3. The antibody solution was decanted, and the blot was washed quickly with two quick rinses of wash buffer. The blot was then covered with wash buffer and incubated on the rocking platform for five minutes, and the wash buffer was decanted. This process was repeated twice for a total of three five-minute washes.

[1042] 4. The blot was developed using ECL reagents (Amersham Biosciences Corp., Piscataway, N.J.) as per manufacturer instructons and luminescence was then digitized on a Kodak Image Sciences Imaging Station.

### Example F17

### CG57094-02 Batch2, Plasmid #1614 CHO Stable Cell Line

[1043] PROTEIN QUALITY CONTROL DATA
Protein Concentration

| by Bradford | by A₂₈₀ Absorbance | Total Protein Batch | |
|---|---|---|---|
| Method (mg/mL) | (mg/mL) | Quantity (mg) | Protein Storage Buffer Composition |
| 0.181 | ND | 2.1 | 20 mM Tris-HCl, pH 7.4 + 150 mM NaCl |

Protein Characterization

| Amino Acid Sequence | | | _N-Terminus _Internal Peptide |
|---|---|---|---|
| Tags Predicted on Purified Protein | | N-terminal: _None _His _V5 x IgK _Melittin | |
| | | C-terminal: _None x His x V5 | |
| Mass Spectroscopy (kd) | ND | Western Blot Analysis (Ab & Ab dilution) | Anti-V5-HRP Antibody (1:5000) |
| | | | S protein HRP conjugate (1:5000) |

Protein Purity

| | | Predicted Size of Protein | Actual Size of Protein | Estimated | Endotoxin | |
|---|---|---|---|---|---|---|
| Gel | Gel | Engineered into Plasmid | Expressed from Plasmid | Purity | Level | Sterile |
| Composition | Staining | (including tags) (kd) | (including tags) (kd) | (≧ %) | (≦ EU/mg) | Filtered |
| 4-20% Tris | Coomassie | 43 | 54 | 95 | 202 | x Yes |
| Glycine | Blue | | | | | _No |

[image]

### Example F18

### CG57094-02 B3, Plasmid #1614 CHO Stable Cell Line

[1045] PROTEIN QUALITY CONTROL DATA
Protein Concentration

| by Bradford | by A₂₈₀ Absorbance | Total Protein Batch | |
|---|---|---|---|
| Method (mg/mL) | (mg/mL) | Quantity (mg) | Protein Storage Buffer Composition |
| 0.26 | ND | 0.54 | 20 mM Tris-HCl, pH 7.4 + 150 mM NaCl |

Protein Characterization

| Amino Acid Sequence | | | _N-Terminus _Internal Peptide |
|---|---|---|---|
| Tags Predicted on Purified Protein | | N-terminal: _None _His _V5 x IgK _Melittin | |
| | | C-terminal: _None x His x V5 | |
| Mass Spectroscopy (kd) | ND | Western Blot Analysis (Ab & Ab dilution) | Anti-V5-HRP Antibody (1:5000) |
| | | | S protein HRP conjugate (1:5000) |

Protein Purity

| | | Predicted Size of Protein | Actual Size of Protein | Estimated | Endotoxin | |
|---|---|---|---|---|---|---|
| Gel | Gel | Engineered into Plasmid | Expressed from Plasmid | Purity | Level | Sterile |
| Composition | Staining | (including tags) (kd) | (including tags) (kd) | (≧ %) | (≦ EU/mg) | Filtered |
| 4-20% Tris | Coomassie | 43 | 54 | 60 | 7.7 | x Yes |
| Glycine | Blue | | | | | _No |

[image]

### Example F19

### CG57094-04 Batch3, 293 Cell Transient Transfection

[1047] Method of Purification

[1048] 1.Metal Affinity Chromatography—PHARMACIA 50 ml Metal Chelate—20 mM sodium phosphate, pH 7.4,0.5 M NaCl. Wash with 20 mM, 50 mM, and 100 mM Imidazole. Elute with 500 mM Imidazole.

[1049] 2. Metal Affinity Chromatography—PHARMACIA 5 ml Metal Chelate—20 mM sodium phosphate, pH 7.4, 0.5 M NaCl. Elute against a gradient from 0-500 mM Imidazole.

[1050] 3. Ion-exchange Chromatography—Poros 50 HS column—Elute against a gradient from 0-1M NaCl in 30 mM Tris-Cl, pH 8.0, 0.05% CHAPS.

[1051] 4. Dialysis—@ 4° C. using 3,500 MW Cutoff against 20 mM Tris-HCl, pH 7.4+150 mM NaCl

[image]

[1052] Example F20

[1053] CG57094-04 Batch4 293 Cell Transient Transfection

[image]

[1054] As indicated in the Certificate of Analysis for the CG57094-04 protein preparation, during expression and purification , the expressed protein undergoes a non obvious proteolityc cleavage that generate a fragment peptide

[1055] The protein sequence of this peptide was determined by N-terminal sequencing of the protein preparation generating a N-terminal sequence of LPEMA QPVDP AHXVS. The sequence was determined by transferring the protein to polyvinylidenedifluoride (PVDF) membranes as described in P. Matsudaira, J. Biol. Chem., 261, 10035-10038 (1987). and then performing automated gas-phase sequencing as described in R. M. Hewick, M. W. Hunkapiller, L. E. Hood, and W. J. Dreyer, J. Biol. Chem., 256, 7990-7997 (1981). The COOH terminus is defined by the tag included in the expression construct (V5 and His peptide) both because the tag is used for purification and because the purified protein is still reactive to the V5 antibodies as shown in the western blot. Therefore the normal COOH terminus of the CG57094 protein is present in the purified protein.

[1056] The molecular features ot this proteolitic fragments are specifically different from those of the parental sequence, of CG57094-02 and of NL2, specifically this protein does not undergo oligomerization due to the loss of the Coil-Coil domain while retaining the receptor binding region, the fiubrinogen domain. This results in a peptide that it is easier to express and purify while retaining activity as shown in the Cell Survival Assay with 786-O Cells example. It represent a non-obvious result of the expression construct and cell line used for expression.

| | |
|---|---|
| >CG57094-O4_proteolityc_fragment | |
| LPEMAQPVDPAHNVSRLHRLPRDCQELFQVGERQSGLFEIQPQGSPPFLVNCKMTSDGGWTVIQRRHDGS | (SEQ ID NO:394) |
| VDFNRPWEAYKAGFGDPHGEFWLGLEKVHSITGORNSRLAVQLRDWDGNAELLQFSVHLGGEDTAYSLQL | |
| TAPVAGQLGATTVPPSGLSVPFSTWDQDHDLRRDKNCAKSLSGGWWFGTCSHSNLNGQYFRSIPQQRQKL | |
| KKGIFWKTWRGRYYPLQATTMLIQPMAAEAASLE | |
| >NL2_MET_ORF_ | |
| MSGAPTAGAALMLCAATAVLLSAQGGPVQSKSPRFASWDEMNVLAHGLLQLGQGLREHAERTRSQLSALE | (SEQ ID NO:395) |
| RRLSACGSACQGTEGSTDLPLAPESRVDPEVLHSLQTQLKAQNSRIQQLFHKVAQQQRHLEKQHLRIQHL | |
| QSQFGLLDHKHLDHEVAKPARRKRLPEMAQPVDPAHNVSRLHRLPRDCQELFQVGERQSGLFEIQPQGSP | |
| PFLVNCKMTSDGGWTVIQRRHDGSVDFNRPWEAYKAGFGDPHGEFWLGLEKVHSITGDRNSRLAVQLRDW | |
| DGNAELLQFSVHLGGEDTAYSLQLTAPVAGQLGATTVPPSGLSVPFSTWDQDHDLRRDKNCAKSLSGGWW | |
| FGTCSHSNLNGQYFRSIPQQRQKLKKGIFWKTWRGRYYPLQATTMLIQPMAAEAAS | |
| >0057094-02 | |
| GPVQSKSPRFASWDEMNVLAHGLLQLGQGLREHAERTRSQLSALERRLSACGSACQGTEGSTDLPLAPESRVDPE | (SEQ ID NO:396) |
| VLHSLQTQLKAQNSRIQQLFHKVAQQQRHLEKQHLRIQHLQSQFGLLDHKHLDHEVAKPARRKRLPEMAQPVDPA | |
| HNVSRLHRLPRDCQELFQVGERQSGLFEIQPQGSPPFLVNCKMTSDGGWTVIQRRHDGSVDFNRPWEAYKAGFGD | |
| PHGEFWLGLEKVHSITGDRNSRLAVQLRDWDGNAELLQFSVHLGGEDTAYSLQLTAPVAGQLGATTVPPSGLSVP | |
| FSTWDQDHDLRRDKNCAKSLSGGWWFGTCSHSNLNGQYFRSIPQQRQKLKKGIFWKTWRGRYYPLQATTMLIQPM | |
| AAEAAS | |
| >CG57094-04 | |
| RSGPVQSKSPRFASWDEMNVLAHGLLQLGQGLREHAERTRSQLSALERRLSACGSACQGTEGSTDLPLAPESRVD | (SEQ ID NO:397) |
| PEVLHSLQTQLKAQNSRIQQLFHKVAQQQRHLEKQHLRIQHLQSQFGLLDHKHLDHEVAKPARRKRLPEMAQPVD | |
| PAHNVSRLHRLPRDCQELFQVGERQSGLFEIQPQGSPPFLVNCKMTSDGGWTVIQRRHDGSVDFNRPWEAYKAGF | |
| GDPHGEFWLGLEKVHSITGDRNSRLAVQLRDWDGNAELLQFSVHLGGEDTAYSLQLTAPVAGQLGATTVPPSGLS | |
| VPFSTWDQDHDLRRDKNCAKSLSGGWWFGTCSHSNLNGQYFRSIPQQRQKLKKGIFWKTWRGRYYPLQATTMLIQ | |
| PMAAEAASLE | |

### Example F21

### PE 52a: Cellular Proliferation

[1057] CG57094 belongs to the angiopoietin-like family of pro-anti angiogenic factors that either induce or inhibit endothelial cell proliferation. We wanted therefore to test whether our preparation CG57094-02 is able to induce or inhibit endothelial cell proliferation. CG57094 did not inhibit endothelial cell proliferation but at a concentration of 10 μg/ml increased the proliferation of HUVEC and HMVEC but the extent of proliferation was not significant.

### Example F22

### Inhibition of HUVEC Proliferation

[1058] BrdU Incorporation in HUVEC cells.

[1059] Proliferative activity is measured by treatment of serum-starved cultured cells with CG57094-02 at 1 mcg/ml and 0.1 mcg/ml and measurement of BrDU incorporation during DNA synthesis. HUVEC cells were cultured in DMEM supplemented with 10% fetal bovine serum or 10% calf serum respectively. Cells were grown to confluence at 37° C. in 10% CO₂/air. Cells were then starved in DMEM for 24- 72 h. pCEP4sec or pCEP4sec/CG57094-02 enriched conditioned medium was added (10 μL/100 μL of culture) for 18 h. BrdU (10 μM final concentration) was then added and incubated with the cells for 5 h. BrdU incorporation was assayed according to the manufacturer's specifications (Boehringer Mannheim, Indianapolis, Ind.).

[1060] 1%FBS plus growth factor stimulated the proliferation of HUVEC cells. In the presence of TNF alpha, which was used as positive control, the proliferation of HUVEC cells was markedly inhibited and was comparable to the level of serum free control. CG57094-02 did not significantly affect the proliferation of these endothelial cells at concentrations of 1 μg and 0.1 μg/ml.

[image]

### Example F23

### Inhibition of HMVEC Proliferation

[1061] BrdU Incorporation in HMVEC cells.

[1062] Proliferative activity is measured by treatment of serum-starved cultured cells with CG57094-02 at 1 mcg/ml and 0.1 mcg/ml and measurement of BrDU incorporation during DNA synthesis. HMVEC cells were cultured in DMEM supplemented with 10% fetal bovine serum or 10% calf serum respectively. Cells were grown to confluence at 37° C. in 10% CO₂/air. Cells were then starved in DMEM for 24- 72 h. pCEP4sec or pCEP4sec/CG57094-02 enriched conditioned medium was added (10 μL/100 μL of culture) for 18 h. BrdU (10 μM final concentration) was then added and incubated with the cells for 5 h. BrdU incorporation was assayed according to the manufacturer's specifications (Boehringer Mannheim, Indianapolis, Ind.).

[1063] 1%FBS plus growth factor stimulated the proliferation of HMVEC cells. In the presence of TNF alpha, which was used as positive control, the proliferation of HMVEC cells was markedly inhibited and was comparable to the level of serum free control. CG57094-02 did not significantly affect the proliferation of these endothelial cells at concentrations of 1 μg and 0.1 μg/ml.

[image]

### Example F24

### Inhibition of CPAE Proliferation

[1064] BrdU Incorporation in Calf pulmonary arterial endothelial cells (CPAE).

[1065] Proliferative activity is measured by treatment of serum-starved cultured cells with CG57094-02 at 1 mcg/ml and 0.1 mcg/ml and measurement of BrDU incorporation during DNA synthesis. CPAE cells were cultured in DMEM supplemented with 10% fetal bovine serum or 10% calf serum respectively. Cells were grown to confluence at 37° C. in 10% CO₂/air. Cells were then starved in DMEM for 24- 72 h. pCEP4sec or pCEP4sec/CG57094-02 enriched conditioned medium was added (10 μL/100 μL of culture) for 18 h. BrdU (10 μM final concentration) was then added and incubated with the cells for 5 h. BrdU incorporation was assayed according to the manufacturer's specifications (Boehringer Mannheim, Indianapolis, Ind.).

[1066] 1% FBS plus growth factor stimulated the proliferation of CPAE cells. In the presence of TNF alpha, which was used as positive control, the proliferation of CPAE cells was markedly inhibited and was comparable to the level of serum free control. CG57094-02 did not significantly affect the proliferation of these endothelial cells at concentrations of 1 μg and 0.1 μg/ml.

[image]

### Example F25

### BrdU Incorporation in HUVEC Cells

[1067] Proliferative activity is measured by treatment of serum-starved cultured cells with CG57094-02 at 10 mcg/ml, 1 mcg/ml, 0.5 mcg/ml, and 0.1 mcg/ml and measurement of BrDU incorporation during DNA synthesis. HUVEC cells were cultured in DMEM supplemented with 10% fetal bovine serum or 10% calf serum respectively. Cells were grown to confluence at 37° C. in 10% CO₂/air. Cells were then starved in DMEM for 24-72 h. pCEP4sec or pCEP4sec/CG57094-02 enriched conditioned medium was added (10 μL/100 μL of culture) for 18 h. BrdU (10 μM final concentration) was then added and incubated with the cells for 5 h. BrdU incorporation was assayed according to the manufacturer's specifications (Boehringer Mannheim, Indianapolis, Ind.). VEGF/bFGF combination at 10 ng/ml was used as positive control.

[1068] CG57094 at a concentration of 10 μg/ml increased the proliferation of HUVEC but the extent of proliferation was not significant.

[image]

### Example F26

### BrdU Incorporation in HMVEC Cells

[1069] Proliferative activity is measured by treatment of serum-starved cultured cells with CG57094-02 at 10 mcg/ml, 5mcg/ml, 1 mcg/ml and 0.1 mcg/ml and measurement of BrDU incorporation during DNA synthesis. HMVEC cells were cultured in DMEM supplemented with 10% fetal bovine serum or 10% calf serum respectively. Cells were grown to confluence at 37° C. in 10% CO₂/air. Cells were then starved in DMEM for 24-72 h. pCEP4sec or pCEP4sec/CG57094-02 enriched conditioned medium was added (10 μL/100 μL of culture) for 18 h. BrdU (10 μM final concentration) was then added and incubated with the cells for 5 h. BrdU incorporation was assayed according to the manufacturer's specifications (Boehringer Mannheim, Indianapolis, IN).

[1070] CG57094 at a concentration of 1 0g/ml increased the proliferation of HMVEC but the extent of proliferation was not significant.

[image]

### Example F27

### PE52: Cellular Survival

[1071] CG57094 belongs to the angiopoietin-like family of pro-anti angiogenic factors that either induce or inhibit endothelial cell survial upon cellular stress like starvation. We wanted therefore to test whether our preparation CG57094-02 is able to induce or inhibit endothelial cell survial. CG57094 at a concentration up to 0.01 μg/ml increased the survival of HUVEC and HMVEC but not CPAE in a significant fashion.

[1072] Cell Viability assay (WST1 survival Assay). Since CG57094-02 did not induce the potent proliferation of endothelial cells, we tested whether the target gene (CG57094-02) would increase the survival of endothelial cell during starvation. Viability of the cells were measured using Wst-1 assay. The cell lines were chosen on the basis of potential cell types implicated in angiogenesis or cancer neovascularization: HUVEC (human umbilical vein endothelial cells), HMVEC-D (endothelial, dermal capillary) and Calf pulmonary arterial endothelial cells (CPAE). 96 well plates (flat bottom) were coated with 100 μl of attachment factor and incubated at 37° C. for one hour. Attachment factor was aspirated and endothelial cells were plated in a DMEM medium containing 0.1% FBS (no growth factors). After 24 h cells were washed and pCEP4sec or pCEP4sec/CG57094-02 enriched conditioned medium was added (10 μL/100 μL of culture) for 48 h. Purified CG57094-02 protein or conditional media was added again, without changing the medium and further incubated for another 24 h. Wst-1 reagent (10 μl/well) was added and incubated for 45min-1 hour at 37° C. Plates were read at 450 nm absorbance.

### Example F28

[1073] In the presence of VEGF/bFGF HUVECs survival of HUVEC cells increased markedly as observed by increase in A450 reading compared to starved cells. Interestingly, CG57094-02 at a concentration of 2.5 μg/ml also increased the viability of HUVEC compared to starved cells. This trend remained the same even at concentrations as low as 0.01 μg/ml of CG57094-02. All of these data suggest that CG57094-02 may be a potent survival factor for endothelial cells. Therefore, inhibition of CG57094-02 activity with a neutralizing monoclonal antibody may inhibit neovascularization of tumors as well as diabetic retinopathies.

[image]

### Example F29

[1074] CG57094-02 at 1 μg/ml showed a marked increase in HUVEC cell survival as compared to starved cells, which is consistent with the results shown in FIG. 6. Interestingly, at higher protein concentrations, cells exhibited a decreased viability with the greatest effect seen at the 5 μg/mL concentration.

[image]

### Example F30

[1075] Consistent with the result seen on HUVEC cells, the survival of HMVEC-d cells were also enhanced by CG57094-02 at lower concentrations. Interestingly, at higher protein concentrations, cells exhibited a decreased viability with the greatest effect seen at the 0.5 μg/mL concentration.

[image]

### Example F31

[1076] VEGF/bFGF increased the survival of CPAE cells as observed by an increase in A450 readings compared to starved cells. Although, CG57094-02 also enhanced the survival of HUVEC and HMVEC-d cells, it had no effect on CPAE cells as measured by Wst-1 reagent.

[image]

### Example F32

### Cell Survival Assay 786-0 Cells

[1077] 786-0 is a human cell line derived from renal carcinoma and lacks one allele and express a truncated protein (AA 1- 104) from the second allele of the von Hippel-Lindau tumor suppressor gene (VHL). The inactivation of the VHL gene predisposes affected individuals to the human VHL cancer syndrome and is associated with sporadic renal cell carcinomas (RCC) and brain hemangioblastomas. We and other people skilled in the art (Pause A, Lee S, Lonergan K M, Klausner R D. The von Hippel-Lindau tumor suppressor gene is required for cell cycle exit upon serum withdrawal. Proc Natl Acad Sci USA Feb. 3, 1998;95(3):993-8) believe that this cell lines represent a suitable in-vitro model to study tumorogenic mechanisms in renal carcinoma.

[1078] Specifically in this example, we wanted to test how treating 786-0 cells with CG57094 purified protein influence their survival in serum withdrawal conditions that would otherwise lead to cell death.

[1079] Method: Standard testing method (STM) CV-SUV-001

TABLE F32a
DEFINITIONS

| Abbreviation/Term | Description |
|---|---|
| 786-O | Human Renal Cell |
| | Adenocarcinoma (ATCC) |
| FBS | Fetal bovine serum |
| P/S | Penicillin/Streptomycin |
| PBS | Phosphate Buffered Saline |
| SFM | Serum Free Media |
| BSA | Bovine Serum Albumin |

[1080] TABLE F32b
REAGENTS, MATERIALS AND EQUIPMENT

| | | Quantity | | | Stock |
|---|---|---|---|---|---|
| Reagent/Material | Location | Required | | Vendor | Number |
| 96-well flat | TC room | 1 per 2 | | Falcon/Becton- | 353072 |
| bottom plates | | proteins | | Dickenson | 08-772-2C |
| | | | | Fisher Scientific | |
| FBS | CV Freezer | 50 | ml | Gemini | 100-106 |
| | 20:110 | | | | |
| BSA | CV Refrigerator | 50 | ml | Sigma | A-9205 |
| | 4:114 | | | | |
| P/S | CV Freezer | 5 | ml | Gibco-BRL | 15140-122 |
| | 20:110 | | | | |
| Trypsin-EDTA | CV Freezer | 50 | ml | Gibco-BRL | 25200-056 |
| (0.25%) | 4:110 | | | | |
| MTS | Main lab, −20° C. | 20 | μl per | Promega | G3581 |
| | #20:110 | | well | | |
| DMEM | CV Refrigerator | 500 | ml | Mediatech | 10-013-CM |
| | 4:110 | | | | |
| Phosphate Buffered | CV Lab | 10 | ml | Mediatech | 20-031-CV |
| Saline, 7.4 | Chemical Shelf | | | | |

[1081] Reagent Preparation

[1082] Complete DMEM:

[1083] DMEM+10%FBS+1% P/S

[1084] Starvation medium:

[1085] DMEM+0.5% FBS+1% P/S

[1086] Serum Free Media

[1087] DMEM+0.1%BSA+1% P/S

[1088] Procedures

[1089] Procedure Summary:

[1090] Cells are plated in the inner sixty wells of a 96-well plate in Complete DMEM. The following day, the cells are washed in SFM and treated with CuraProteins in 0.5% FBS/DMEM. Untreated cells serve as baseline controls. Cells cultured in 10% FBS serve as positive controls. On the third day following treatment, MTS is added to the medium and the cells are incubated for 0.5-4 hrs. The absorbance of the wells is then determined using a microplate absorbance reader.

[1091] Day 1:

[1092] A. Prepare Cells.

[1093] 1. Wash a flask of 70-80% confluent cells 1× with PBS.

[1094] 2. Treat cells for 1 min with 5 ml Trypsin/EDTA per T175 flask until cells can be knocked free from the bottom of the culture flask.

[1095] 3. After cells have been knocked free, add 5 ml of Complete DMEM to flask.

[1096] 4. Transfer cell suspension to a 15 ml conical bottom centrifuge tube.

[1097] 5. Centrifuge cell suspension at 1200 RPM for 5 min at 4° C.

[1098] 6. Resuspend cells with 10 mls of Complete DMEM.

[1099] C. Count viable cells using trypan blue in a hemacytometer.

[1100] D. Dilute cells with Complete DMEM to yield 5,000 cells/well, 10 mL per plate needed.

[1101] E. For blank wells add 100 μl of Complete DMEM no cells.

[1102] F. Incubate at 37° C. in 10% CO₂ humidified incubator over-night.

[1103] Day2:

[1104] A. View plate for appropriate confluency, viability, and consistency of plating from well to well.

[1105] 1. Wash plate 2 times with SFM.

[1106] B. Add CuraProteins and controls to appropriate wells.

[1107] 1 For positive controls, add 100 μl Complete DMEM in wells.

[1108] 2. For negative controls, add 100 μl 0.5% FBS/DMEM in wells.

[1109] 3. For Buffer controls, add similar amount of buffer solution used in highest concentration protein treatments.

[1110] 4. For blank wells, add 100 μl Complete DMEM in wells.

[1111] C. Incubate at 37° C. in 10% CO₂ humidified incubator for next three days.

[1112] Day 5:

[1113] A. Visually inspect wells for effects and then add 20 μl MTS to each well.

[1114] B. Incubate at 37° C. in 10% CO₂ humidified incubator for 0.5-4 hrs.

[1115] C. Read plates on PowerWave spectrophotometer at 490 nm, single wavelength (KC4 program/Protocol/MTS490/ save file in MS EXCEL format).

[1116] Results of CV-SUV-001:

[1117] The results were assessed by measuring the MTS activity of the cells after 5 days of treatment as described above comparing cell treated with various amount of CG57094, (1) relative to cells without serum stimulation stimulation or stimulated with 0.5% serum (negative controls) and (2) in the last experiment, relative to complete media (positive control). The results are considered positive, if the increase of MTS activity is greater than in the negative controls in a statistically significant fashion. The results below are indicative of the utility of the CG57064, and possibly related polypeptides, in pro-angiogenic therapy and specifically in cardiovascular diseases. The IC50 for the 04 preparations of CG57094 is around 5 μg/ml, for the 02 preparation is below 500 ng/ml and above 100 ng/ml. Considering its overexpression in tumor cells and tumor tissues obtained from kidney, lung, melanomas and breast cancers and the cellular data that revealed how tumor cell survival, especially kidney cancer cell survival, is stimulated by CG57094, inhibiting its activity will have utility in cancer therapy and specifically in inhibiting kidney, lung, melanomas and breast cancers.

[1118] The results of this set of experiment are non-obvious in light of the previous art both as disclosed by U.S. Pat. No. 6,455,496 and U.S. Pat. No. 6,074,873.

[1119] In these applications the inventors disclosed activity only on endothelial cell that is opposite to what we discovered. In example 10 of U.S. Pat. No. 6,074,873 they disclosed that their NL2 preparation induced endothelial cell apoptosis, the opposite of cell survival. Kim et al. (Kim, I; Kim, H G; Kim, H; Kim, H H; Park, S K; Uhm, C S; Lee, Z H; Koh, G Y. Hepatic expression, synthesis and secretion of a novel fibrinogen/angiopoietin-related protein that prevents endothelial-cell apoptosis. Biochem J 2000 346 Pt 3: 603-610.) disclosed a anti-apoptotic activity only on endothelial cells and with a limited effect (30 and 45% reduction). The activity that we discovered on 786-0 has a range of specific activity less that I microgram/ml and the effect is substantial (500-1000%) that permit to set up a screening assay for, neutralizing antibodies (antibodies that bind to CG57094 and related polypeptides and block their activity).

[1120] FIG. 22 shows both preparations of CG57094 protein were able to stimulate the survival of 786-0 cells, compared with controls. The 02 preparation appears to have an higher specific activity.

[image]

| | | av. | st. dev | |
|---|---|---|---|---|
| (−) | | 0.020033333 | 0.00608824 | TTEST against |
| 0.5% FBS | | 0.0217 | 0.00497996 | 0.5% serum |
| CG57094-02 B2 | | | | |
| 1 | ug/ml | 0.383033333 | 0.602524965 | 0.406308204 |
| 3 | ug/ml | 1.030033333 | 0.431413182 | 0.056312197 |
| 6 | ug/ml | 1.3587 | 0.033645208 | 0.000250838 |
| 10 | ug/ml | 1.3397 | 0.123405835 | 0.00303949 |
| 30 | ug/ml | 1.289033333 | 0.015275252 | 5.11734E−05 |
| | buffer | 0.0657 | 0.089515362 | 0.472407116 |
| CG57094-04 B4 | | | | |
| 1 | ug/ml | 0.024033333 | 0.013012814 | 0.723436712 |
| 3 | ug/ml | 0.035366667 | 0.009712535 | 0.12823907 |
| 6 | ug/ml | 0.709033333 | 0.261977734 | 0.044591873 |
| 10 | ug/ml | 1.2697 | 0.160726476 | 0.002005621 |
| 30 | ug/ml | 1.489033333 | 0.024006943 | 8.64534E−05 |
| | buffer | 0.017033333 | 0.013503086 | 0.650072894 |

[1121] The survival activity was repeated by both preparations of CG57094 protein. The 02 preparation appears to have a higher specific activity than before.

[image]

| | | av. | st. dev | |
|---|---|---|---|---|
| (−) | | 0.043466667 | 0.004633213 | TTEST against |
| 0.5% FBS | | 0.1413 | 0.013397761 | 0.5% serum |
| CG57094-02 B2 | | | | |
| 1 | ug/ml | 1.039466667 | 0.035275109 | 0.00036726 |
| 3 | ug/ml | 1.1418 | 0.04095119 | 0.000446 |
| 6 | ug/ml | 1.1628 | 0.005567764 | 1.5068E−05 |
| 10 | ug/ml | 1.083466667 | 0.142205251 | 0.0060124 |
| 30 | ug/ml | 1.1618 | 0.02007486 | 8.6897E−05 |
| | buffer | 0.161133333 | 0.05770904 | 0.07027706 |
| CG57094-04 B3 | | | | |
| 1 | ug/ml | 0.204133333 | 0.047056703 | 0.20173704 |
| 3 | ug/ml | 0.369133333 | 0.099651058 | 0.02678674 |
| 6 | ug/ml | 0.648466667 | 0.120238652 | 0.01299048 |
| 10 | ug/ml | 1.0808 | 0.023895606 | 0.00011835 |
| 30 | ug/ml | 1.086466667 | 0.046576103 | 0.00074619 |
| | buffer | 0.1138 | 0.036373067 | 0.05843518 |

[1122] The survival activity was repeated using 2 batches of the same preparations of CG57094 protein. Batch 03 of preparation 02 had higher specific activity

[image]

| | | av. | st. dev |
|---|---|---|---|
| (−) | | 0.012433333 | 0.002081666 |
| 0.5% FBS | | 0.028433333 | 0.005773503 |
| complete | | 1.0451 | 0.180357977 |
| CG57094-02 B2 | | | |
| 1 | ng/ml | 0.036766667 | 0.009291573 |
| 10 | ng/ml | 0.033766667 | 0.004618802 |
| 100 | ng/ml | 0.035766667 | 0.016165808 |
| 500 | ng/ml | 0.043433333 | 0.003511885 |
| 1 | ug/ml | 0.0661 | 0.00781025 |
| 10 | ug/ml | 1.064433333 | 0.0306159 |
| buffer high | | 0.017433333 | 0.005686241 |
| buffer mid | | 0.027433333 | 0.013576941 |
| CG57094-02 B3 | | | |
| 1 | ng/ml | 0.027766667 | 0.010503968 |
| 10 | ng/ml | 0.034766667 | 0.005859465 |
| 100 | ng/ml | 0.047433333 | 0.002081666 |
| 500 | ng/ml | 0.9061 | 0.064969223 |
| 1 | ug/ml | 1.103766667 | 0.029143324 |
| 10 | ug/ml | 1.1281 | 0.053113087 |

| | | |
|---|---|---|
| buffer high | 0.029433333 | 0.01106044 |
| buffer mid | 0.0221 | 0 |

### Example F33

### Pe 52a1—Cell Survival Assay of Activated T-Lymphocytes and Macrophages

[1123] ARP protein is tested for the ability to prevent apoptosis in activated T-lymphocytes and macrophages since it was shown that these cell types are present in knee synovial samples from patients with knee osteoarthritis [Saito I, Koshino T, Nakashima K, Uesugi M, Saito T. Increased cellular infiltrate in inflammatory synovia of osteoarthritic knees. Osteoarthritis Cartilage. February 2002;10(2):156-62.]. The following methods are used for validation of APR effects on T cells and macrophages: measurement of cell proliferation, relevant cytokine production (IL-2, IL-4, IL-6, TNF-a etc.). In addition early apoptosis markers (Anexin V binding) are tested. The increased cell proliferation and cytokine production indicates positive effects of ARP on cell survival. Decreased Anexin V binding also indicates prevention of apoptosis.

[1124] For screening of the therapeutic neutralizing antibody similar tests are used. Criteria for antibody selection are as follows:

[1125] 1. Binding to ARP (ELISA)

[1126] Inhibition of survival T lymphocytes and macrophages induced by ARP in vitro.

### Example F34

### Preparation of Antibodies that Bind CG57094

[1127] As described above, inhibiting CG57094 activity has utility in cancer therapy and specifically in inhibiting kidney, lung, melanomas and breast cancers. It is know in the art that antibodies that bind secreted factors like CG57094 can inhibit their activity in a process called neutralization. Specifically, neutralizing monoclonal antibodies that bind VEGF have been shown to inhibit tumor growth acting against tumor-induced angiogenesis () Therefore production of polyclonal and monoclonal antibodies directed against CG57094 has utility in cancer therapy and specifically in inhibiting kidney, lung, melanomas and breast cancers. As opposed to VEGF, that is needed only for tumor induced endothelial cell growth and survival, CG57094 is required for cell growth and survival both by endothelial and tumor cells, therefore inhibition of CG57094 activity could have a more pronounced therapeutic effect.

[1128] Because of the non-obvious result from the protein expression that indicates how CG57094-04 generate a proteolitic fragment that encode only the fibrinogen domain, we decided to use that fragment as an antigen for immunization. As discussed the fibrinogen domain is the region that binds the receptor, so antibodies that bind to this region are preferable because they have high possibility to be neutralizing.

[1129] Method: Techniques for producing the antibodies are known in the art and are described, for example, in “Antibodies, a Laboratory Manual” Eds Harlow and Lane, Cold Spring Harbor publisher. Both rabbits and mice are suitable for the production of polyclonal antibodies, while mice are also suitable for the production of monoclonal antibodies. Mice where the human immunoglubolin genes have replaced the mouse immunoglubolin genes can be used to produce fully human monoclonal antibodies. These antibodies have better pharmaceutical characteristic, no or minimal antibody directed immune reactions that results in loss of therapeutic efficacy and have been shown to eradicate tumor in animal model (Yang X D, Jia X C, Corvalan J R, Wang P, Davis C G, Jakobovits A Eradication of established tumors by a fully human monoclonal antibody to the epidermal growth factor receptor without concomitant chemotherapy. Cancer Res Mar. 15, 1999;59(6):1236-43). Of particular use in this application are bispecific antibody comprised of an antibody unit specific for VEGF and an antibody unit specific for CG57094. We have disclosed that in tumors, specifically in renal cell carcinomas, there is a high correlation between the expression of VEGF and CG57094. Both protein support tumorogenesis by increasing tumor-induced angiogenesis, so an antibody that block the activity of both proteins at once would have a preferable therapeutic activity. An example is VL(a)-Linker-VH(a)-Linker-VL(b)-Linker-VH(b), where a is an antibody variable region segment directed to VEGF and b is an antibody variable region segment directed to CG57094, or vice versa. Other examples of bispecific antibodies are reviewed by Carter Improving the efficacy of antibody-based cancer therapies. Nat Rev Cancer November 2001; 1(2): 118-29

### Example F35

### Generation of Rabbit Polyclonal Antibodies

[1130] Rabbit are immunized with the immunogen emulsified in complete Freund's adjuvant and injected subcutaneously or intraperitoneally or intramuscolar in an amount from 50-1000 micrograms. The immunized rabbits are then boosted 10 to 12 days later with additional immunogen emulsified in the selected adjuvant. Thereafter, for several weeks, the rabbits might also be boosted with additional immunization injections. Serum samples may be periodically obtained from the rabbit by bleeding of the ear for testing ELISA assays to detect the antibodies.

### Example F36

### ELISA Protocol to Determine Binding of the Antibodies

[1131] Solution Preparation

[1132] Coating Buffer (0.1M Carbonate, pH9.5)

[1133] 8.4 g. NaHCO3, 3.56 g. Na2CO3, pH to 9.5, and dilute to 1 L. with ddH20

[1134] Assay Diluent

[1135] Pharmingen #26411E

[1136] Protocol

[1137] Coat a 96-well high protein binding ELISA plate (Corning Costar #3590) with 50 ul. of protein at a concentration of 5 ug/mL. in coating buffer overnight at 4 degrees.

[1138] Following day wash the cells 5× 200-300 ul. of 0.5% Tween-20 in PBS.

[1139] Block plates with 200 ul. of assay diluent for at least 1 hour at room temperature.

[1140] Dilute antibodies in assay diluent.

[1141] Wash plate as in step 2.

[1142] Add 50 ul. of each antibody dilution to the proper wells for at least 2 hours at room temp.

[1143] Wash plate as in step 2.

[1144] Add 50 ul. of secondary antibody and incubate for 1 hour at room temp.

[1145] Wash plate as in step 2.

[1146] Develop assay with 100 ul. of TMB substrate solution/well. (1:1 ratio of solution A+B) (Pharmingen #2642KK)

[1147] Stop reaction with 50 ul. sulfuric acid

[1148] Read plate at 450 nm with a correction of 550 nm.

[1149] Results:

[1150] The CG57094-02 purified protein preparation was able to induce a strong immune reaction as shown by the elisa data in FIGS. 25-26-27. Only the immune serum and not the preimmune serum shows strong reactivity against CG57094-02 coated plates (FIGS. 25-26) while no reactivity was seen against non-coated plates (FIG. 27)

[1151] This data indicates that the CG57094-02 purified protein preparation is a good immunogen and can be used to generate antibodies.

[image]

TABLE F36a

| Cr064 | | Preimmune | |
|---|---|---|---|
| serum | OD- | serum | OD- |
| dilutions | blank | dilutions | blank |
| 100 | 0.999 | 100 | 0.021 |
| 1000 | 0.876 | 1000 | 0.004 |
| 2000 | 0.931 | 2000 | 0.003 |
| 4000 | 0.963 | 4000 | 0.002 |
| 8000 | 0.732 | 8000 | 0.002 |
| 10000 | 0.669 | 10000 | 0.002 |
| 20000 | 0.511 | 20000 | 0.001 |
| 100000 | 0.147 | 100000 | 0.001 |
| 200000 | 0.084 | 200000 | 0.001 |
| 1000000 | 0.018 | 1000000 | 0.001 |

[1152] [image] TABLE F36b

| Cr064 | | Preimmune | |
|---|---|---|---|
| serum | OD- | serum | OD- |
| dilutions | blank | dilutions | blank |
| 100 | 1.066 | 100 | 0.024 |
| 1000 | 1.127 | 1000 | 0.003 |
| 2000 | 1.054 | 2000 | 0.002 |
| 4000 | 0.993 | 4000 | 0.001 |
| 8000 | 0.720 | 8000 | 0.001 |
| 10000 | 0.714 | 10000 | 0.001 |
| 20000 | 0.536 | 20000 | 0.000 |
| 100000 | 0.153 | 100000 | 0.000 |
| 200000 | 0.088 | 200000 | 0.000 |
| 1000000 | 0.017 | 1000000 | 0.001 |

[1153] [image] TABLE F36c

| Cr064 | | Preimmune | |
|---|---|---|---|
| serum | OD- | serum | OD- |
| dilutions | blank | dilutions | blank |
| 100 | 0.290 | 100 | 0.030 |
| 1000 | 0.066 | 1000 | 0.005 |
| 2000 | 0.036 | 2,000 | 0.002 |
| 4000 | 0.021 | 4,000 | 0.002 |
| 8000 | 0.010 | 8,000 | 0.001 |
| 10000 | 0.008 | 10,000 | 0.002 |
| 20000 | 0.004 | 20000 | 0.002 |
| 100000 | 0.001 | 100,000 | 0.001 |
| 200000 | 0.002 | 200,000 | 0.001 |
| 1000000 | 0.001 | 1,000,000 | 0.001 |

### Example F37

### Identification of CG57094 Neutralizing Antibodies

[1155] As shown in the Cell Survival Assay for 786-O Cells, purified CG57094 has a survival activity for 786-0 with an IC50 for the 04 preparation around 5 μg/ml and for the 02 preparation below 500 ng/ml and above 100 ng/ml.

[1156] As previously discussed, the identification of antibodies, preferably fully human monoclonal antibodies that bind to CG57094 and neutralize its activity, limiting or abolishing its ability to rescue cell from serum withdrawal conditions, would be very beneficial because these antibodies will have therapeutic effect against tumors, specifically against kidney, lung, melanomas and breast cancers. To determine whether an antibody can neutralize CG57094 activity, various amounts of such antibody are added to the Cell Survival Assay for 786-0 Cells as described in the method below. The results are assessed by measuring the MTS activity of the cells after 5 days of treatment as described below comparing cell treated with various amount of the antibody, (1) relative treated with non-binding antibody (negative controls) and (2) relative to serum-starved cells (positive control). The results are considered positive, if the decrease in MTS activity is greater than in the negative controls in a statistically significant fashion.

[1157] Antibody that can neutralize the CG57094 activity at least with a molar ratio of 10:1 antibody:CG57094 can be useful as therapeutic, lower molar ratio are preferable.

[1158] Method: Standard testing method (STM) CV-ANTSUV-001

TABLE F37a
DEFINITIONS

| Abbreviation/Term | Description |
|---|---|
| 786-O | Human Renal Cell Adenocarcinoma (ATCC) |
| FBS | Fetal bovine serum |
| P/S | Penicillin/Streptomycin |
| PBS | Phosphate Buffered Saline |
| SFM | Serum Free Media |
| BSA | Bovine Serum Albumin |
| Negative antibody | Human isotype matched negative control antibody |

[1159] TABLE F37b
REAGENTS, MATERIALS AND EQUIPMENT

| Reagent/ | | Quantity | | | Stock |
|---|---|---|---|---|---|
| Material | Location | Required | | Vendor | Number |
| 96-well | TC room | 1 | per 2 | Falcon/Becton- | 353072 |
| flat | | | proteins | Dickenson | 08-772-2C |
| bottom | | | | Fisher | |
| plates | | | | Scientific | |
| FBS | CV Freezer | 50 | ml | Gemini | 100-106 |
| | 20:110 | | | | |
| BSA | CV Refrig- | 50 | ml | Sigma | A-9205 |
| | erator | | | | |
| | 4:114 | | | | |
| P/S | CV Freezer | 5 | ml | Gibco-BRL | 15140-122 |
| | 20:110 | | | | |
| Trypsin- | CV Freezer | 50 | ml | Gibco-BRL | 25200-056 |
| EDTA | 4:110 | | | | |
| (0.25%) | | | | | |
| MTS | Main lab, | 20 | μl per | Promega | G3581 |
| | −20° C. | | well | | |
| | # 20:110 | | | | |
| DMEM | CV Refrig- | 500 | ml | Mediatech | 10-013-CM |
| | erator | | | | |
| | 4:110 | | | | |
| Phosphate | CV Lab | 10 | ml | Mediatech | 20-031-CV |
| Buffered | Chemical | | | | |
| Saline, | Shelf | | | | |
| 7.4 | | | | | |

[1160] Procedures

[1161] Procedure Summary:

[1162] Cells are plated in the inner sixty wells of a 96-well plate in Complete DMEM. The following day, the cells are washed in SFM and treated with CuraProteins in 0.5% FBS/DMEM. Untreated cells serve as baseline controls. Cells cultured in 10% FBS serve as positive controls. On the third day following treatment, MTS is added to the medium and the cells are incubated for 0.5-4 hrs. The absorbance of the wells is then determined using a microplate absorbance reader.

[1163] Day 1:

[1164] A. Prepare Cells.

[1165] 1. Wash a flask of 70-80% confluent cells 1× with PBS.

[1166] 2. Treat cells for˜1 min with 5 ml Trypsin/EDTA per T175 flask until cells can be knocked free from the bottom of the culture flask.

[1167] 3. After cells have been knocked free, add 5 ml of Complete DMEM to flask.

[1168] 4. Transfer cell suspension to a 15 ml conical bottom centrifuge tube.

[1169] 5. Centrifuge cell suspension at 1200 RPM for 5 min at 4° C.

[1170] 6. Resuspend cells with 10 mls of Complete DMEM.

[1171] C. Count viable cells using trypan blue in a hemacytometer.

[1172] D. Dilute cells with Complete DMEM to yield 5,000 cells/well, 10 mL per plate needed.

[1173] E. For blank wells add 100 μl of Complete DMEM no cells.

[1174] F. Incubate at 37° C. in 10% CO₂ humidified incubator over-night.

[1175] Day2:

[1176] A. View plate for appropriate confluency, viability, and consistency of plating from well to well.

[1177] 1. Wash plate 2 times with SFM.

[1178] B. Add CuraProteins and controls to appropriate wells.

[1179] 1. For positive controls, add 100 μl Complete DMEM in wells.

[1180] 2. For negative controls, add 100 μl 0.5% FBS/DMEM in wells.

[1181] 3. For Buffer controls, add similar amount of buffer solution used in highest concentration protein treatments.

[1182] 4. For negative antibody control use 100 μl of negative antibody in 0.5% FBS/DMEM. Also use 100 μl of negative antibody and add appropriate (predetermined) concentration of survival factor. Mix and let stand at room temperature for 10 to 20 minutes for binding, then add 100 μl to each of three wells/treatment.

[1183] 4. For blank wells, add 100 μl Complete DMEM in wells.

[1184] 5. In an eppendorf tube add appropriate (pre-determined) concentration of survival factor with 10 μg/ml of experimental antibody, and in a second tube, again with survival factor and 1 μg/ml of experimental antibody. Mix tube and let stand for 10 to 20 minutes for binding, then add 100 μl to each of three wells/treatment.

[1185] C. Incubate at 37° C. in 10% CO₂ humidified incubator for next three days.

[1186] Day 5:

[1187] A. Visually inspect wells for effects and then add 20 μl MTS to each well.

[1188] B. Incubate at 37° C. in 10% CO₂ humidified incubator for 0.5-4 hrs.

[1189] C. Read plates on PowerWave spectrophotometer at 490 nm, single wavelength (KC4 program / Protocol/MTS490/ save file in MS EXCEL format).

[1190] Reagent Preparation

[1191] Complete DMEM:

[1192] DMEM+10%FBS+1% P/S

[1193] Starvation medium:

[1194] DMEM+0.5% FBS+1% P/S

[1195] Serum Free Media

[1196] DMEM+0.1%BSA+1% P/S

### Example F38

### Effects of Neutralizing Antibodies Binding to CG57094-04 (defined as CR064) in Matrigel Plug 786-0 Renal Carcinoma Induced Angiogenesis in Athymic Nude Mice

[1197] Purified CG50794-02 and 04 have demonstrated ability to increase survival of endothelial and 786-0 tumor cells in cell culture studies. We hypothesize that neutralizing antibodies against CR064 should inhibit survival of endothelial cell and 786-0 tumor cell in cell culture studies. We hypothesize that these antibodies could offer an antiangiogenic and antitumor effect in a 786-0 driven in vivo model of vessel growth. This activity is not limited to this particular cellular model but should be relevant to the angiogenic reponse by other tumor cell lines, preferably those cell lines that naturally express CG50794 polypepetides.

[1198] To evaluate the effects of Cr064 in tumor induced angiogenesis Matrigel plug model using 786-0 human clear cell renal carcinoma. This Matrigel plug assay is designed to provide a quantifiable measure of tumor induced angiogenic response under in vivo conditions as a screen for evaluating the antiangiogenic and antitumor efficacy of CR064. Such a strategy has already been used by Liao et al. to show that a neutralizing antibody against Vascular E-Cadherin inhibited tumor-induce angiogenesis (Liao F, Doody J F, Overholser J, Finnerty B, Bassi R, Wu Y, Dejana E, Kussie P, Bohlen P, Hicklin D J. Selective targeting of angiogenic tumor vasculature by vascular endothelial-cadherin antibody inhibits tumor growth without affecting vascular permeability. Cancer Res 2002 May 1 ;62(9):2567-75). Our antibody will have a preferable activity because it will affect the survival not only of endothelial cells but also of tumor cells.

[1199] Histological evaluation will assess the total vascularity of the subcutaneously implanted Matrigel plugs, as well as any antiangiogenic effect by CR064. Efficacy for this antibody in this model will be defined as the inhibition of 786-0 cell induced angiogenesis as measured by the establish histological methods described below.

MATERIALS AND METHODS

| | Test System |
|---|---|
| Species/ | Mice Balb/C Athymic homozygous nude |
| strain: | (nu/nu) |
| Physiological | Normal. |
| state: | |
| Age/weight | ˜6-8 weeks, 18-20 g. |
| range at start | |
| of study: | |
| Number/sex | Total of 25 female mice will be required. |
| of animals: | |
| Identification: | Animals are identified by dots at the base |
| | of tail delineating animal numbers. All the |
| | cages will be labeled with protocol number, |
| | group and animal numbers with appropriate |
| | color codes |
| Randomization: | According to body weight. |
| Justification: | This study is designed to use a minimum |
| | of laboratory animals sufficient to detect |
| | meaningful efficacy results within the |
| | treatment period. |
| Replacement: | Animals will not be replaced during this |
| | study. |

Animal Housing and Environment

| | |
|---|---|
| Housing: | Animals will be housed 5 mice per cage in |
| | polycarbonate microisolation cages, wood |
| | chip bedding and suspended food and sterile |
| | water bottles. The cages conform to the |
| | guidelines cited in the Guide for the Care |
| | and Use of Laboratory Animals and the |
| | applicable Standard Operating Procedures. |
| Acclimation: | Mice will be acclimated for 8 days and given |
| | food and sterile water ad libitum. Animals |
| | will be examined prior to initiation of the |
| | study to assure adequate health and suitability. |
| | Animals that are found to be diseased or |
| | unsuitable will not be assigned to the study. |
| Environmental | During the course of the study, 12-hour |
| conditions: | light/12-hour dark cycle will be maintained. |
| | A nominal temperature range of 20 to 23° C. |
| | with a relative humidity between 30% and 70% |
| | will also be maintained. |
| Food/water and | Harlan Teklad rodent diet and sterile water |
| contaminants: | will be provided ad libitum |

Administration of Cr064 antibodies

| | |
|---|---|
| Route and | Cr064 will be dosed IP at least twice a |
| method of | week. |
| administration: | |
| Justification | This route will be used to evaluate |
| for route of | pharmacologic efficacy in this model. |
| administration: | |
| Administered | 1, 5 and 10 mg/kg |
| dose: | |
| Administered | Adjust by body weight, 20 gram mouse/ |
| volume: | 0.2 mls |
| Identity and | 786-0 human renal clear cell |
| lot number: | adenocarcinoma; batch number P1 5IC |
| Physical | Human Renal Clear Cell Adenocarcinoma |
| description: | |
| Source: | ATCC |
| Characterization/ | ATCC |
| certification: | |
| Storage | |
| conditions: | |
| Stability/ | Long-term storage in liquid nitrogen. Thawed |
| expiration | and cultured for 48 hours before use. |
| date: | Harvested cells are stored at 4° C. during |
| | transfer between the laboratory to the |
| | Specific Pathogen Free Facility |

[1200] Experimental Design

[1201] Mice will be randomized and groups of 5 will be implanted with Matrigel reconstituted with the required tumor cell lines. A total of 0.5 ml of the suspension will be subcutaneously injected into the right flank of athymic, female, nude mice. Additional will be implanted with Matrigel containing 786-0 renal cell carcinoma (1.0×10⁶ cells). Animals implanted with Matrigel containing 786-0 cells will be dosed with 1, 5 and 10 mg/kg, IP, twice daily. Animals will be monitored for 7 days, sacrificed and the Matrigel plugs will be imaged and harvested for further histological evaluation.

TABLE F38a

| Group | | Number of | Matrigel |
|---|---|---|---|
| Number | Treatment^{a} | Animals | Volume/Mouse |
| 1 | Matrigel Alone | 5 | 0.5 mL/Mouse |
| 2 | Matrigel plus 786-0 | 5 | 0.5 mL/Mouse |
| | cells + vehicle | | |
| 3 | Matrigel plus 786-0 | 5 | 0.5 mL/Mouse |
| | cells, CR064 1.0 | | |
| | mg/kg, | | |
| 4 | Matrigel plus 786-0 | 5 | 0.5 mL/Mouse |
| | cells, CR064 5.0 | | |
| | mg/kg, | | |
| 5 | Matrigel plus 786-0 | 5 | 0.5 mL/Mouse |
| | cells, CR064 10 | | |
| | mg/kg | | |

^{a}Matrigel volume of 0.5 ml will be injected into right flank

[1202] Clinical Observations/Signs

[1203] Mice will be observed daily for moribundity and mortality approximately 60 minutes ing.

[1204] Body Weight

[1205] Individual body weights of all mice will be recorded daily, for randomization and

[1206] Animals Found Dead or Moribund

[1207] If animal dies prior to necropsy (found dead) necropsy and histology data will not be included and tissues will not be collected.

[1208] Necropsy

[1209] At necropsy, animals will be euthanized by CO₂ asphyxiation. The Matrigel plugs will be exposed through surgical removal of the covering skin flap. Digital images will then be recorded of the matrigel.—The matrigel plug will then be surgically removed, and processed as described below. Cervical dislocation of mice under deep anesthesia will be performed before the final disposal of animals.

[1210] Matrigel plugs will be then resected carefully and cut into three parts.

[1211] One part will be snap frozen in TissueTek and used for cryocut sections.

[1212] One part will be fixed in buffered formalin and then embedded in paraffin for sectioning.

[1213] One part will be reserved as a backup. Snap frozen and stored at −80° C.

[1214] Macroscopic and Histopathology

[1215] Formalin Fixed Matrigel Sections:

[1216] Three sections/mouse of 5 to 7 μm in thickness will be cut and stained with hematoxylin and Eosin. Sections will be examined under phase contrast microscope. Representative photomicrographs will be recorded [two frames (10× and 40×)]. Infiltration of endothelial cells and vessels will be recorded.

[1217] Vessel Staining by Immunohistochemistry:

[1218] Frozen Matrigel plugs will be sectioned (5 μm sections) in a Cryocut microtome. Three independent sections per mouse will be made at different levels and used for staining. Sections will be blocked with BSA (0.1%) and then treated with monoclonal antibody reactive to mouse CD31 conjugated to Phycoerythin (dilutions as recommended by the manufacturer). After thorough washings, sections will be mounted under anti-fading reagent (Vecta Shield) and observed under UV microscope using Red filter. Representative Digital images will be captured (two images at 100×and 200×magnification).

[1219] Morphometric Analysis of Vessel Density:

[1220] Immunofluorescence images of CD31 staining will be analyzed by Skeletinization program as described by Wild et al (1). Data will be processed to provide mean vessel density, node and length for each group.

[1221] Data Analysis and Reporting

[1222] Statistical Analysis

[1223] Final Report

[1224] At the conclusion of the study, the results will be reported in full. This final report will include the experimental design, description of local and systemic effects, body weight, mortality and results of macroscopic and histopathologic findings. The format of all textual reports, including figures, tables, and scanned images will conform to CuraGen standards (CuraStandards). Data presentation will include:

[1225] Representative Color Photomicrographs

[1226] Digital files (JPEG or TIFF or PDB) for permanent record

[1227] 1. Wild, R., S. Ramakrishnan, J. Sedgewick, and A. W. Griffioen 2000. Quantitative assessment of angiogenesis and tumor vessel architecture by computer-assisted digital image analysis: effects of VEGF-toxin conjugate on tumor microvessel density Microvasc Res. 59:368-76.

### Example F39

### Efficacy Evaluation of CUR64 Against the 786-0 Human Renal Cell Carcinoma Line Grown as a Xenograft in Nude Mice

[1228] Purified CG50794-02 and 04 have demonstrated ability to increase survival of endothelial and 786-0 tumor cells in cell culture studies. We hypothesize that neutralizing antibodies against CR064 should inhibit survival of endothelial cell and 786-0 tumor cell in cell culture studies. We hypothesize that these antibodies could offer an antiangiogenic and antitumor effect in a 786-0 driven in vivo model of tumor xenograft.

[1229] The ability of this tumor cell line to produce ectopic tumor xenograft in nude mice is known in the art and it has been used to test the anti-tumor activity of several agents (Plonowski A, Schally A V, Nagy A, Kiaris H, Hebert F, Halmos G Inhibition of metastatic renal cell carcinomas expressing somatostatin receptors by a targeted cytotoxic analogue of somatostatin AN-238. Cancer Res 2000 June 1;60(11):2996-3001)

[1230] This activity is not limited to this particular cellular model but should be relevant to other tumor cell lines, preferably those cell lines that naturally express CG50794 polypeptides.

[1231] Combination therapy of biological compounds like subcutaneous interferon-alpha (IFN-alpha) and interleukin-2 (IL-2) with intravenous 5-fluorouracil (5-FU) is nowdays standard therapy and achieves some long-term survival benefits in patients with metastatic renal cell carcinoma but it is not curative and affects only a subset of patients. It is therefore necessary to discover new agents that either as single therapy or in combination with 5-FU increase both the overall response rate, long term survival and quality of life.

[1232] Therefore we test the efficacy of CR064 antibodies in the 786-0 tumor xenograft alone and in combination with 5-FU. Efficacy for this antibody in this model will be defined as tumor growth delay or growth inhibition as single therapy or combination as measured by the established methods described below.

| | Test System |
|---|---|
| Species/strain: | Mouse/ nu/nu |
| Physiological | Normal |
| state: | |
| Age/weight range | Animals aged 5 to 6 weeks with body |
| at start of study: | weight of approximately 20 g |
| Animal supplier: | Charles River |
| Number/sex | 60/Female |
| of animals: | |
| Identification: | Individually tattooed tails. |
| Randomization: | Animals will be randomized prior to |
| | assignment to treatment groups |
| Justification: | Xenograft tumor models present a well |
| | characterized system for testing of |
| | anti-cancer agents. |
| Replacement: | Animals will not be replaced during |
| | the course of the study. |

Animal Housing and Environment

| | |
|---|---|
| Housing: | Static microisolators. |
| Acclimation: | 1 week. |
| Environmental | 12-hour light cycle at 21-22° C. |
| conditions: | (70-72° F.) and 40%-60% humidity. |
| Food/water and | Irradiated standard rodent diet (NIH31 |
| contaminants: | Modified and Irradiated) consisting of: |
| | 18% protein; 5% fat; and 5% fiber; water |
| | (reverse osmosis, 1 ppm Cl), ad libitum |

Administration of Cr064 antibodies

| | |
|---|---|
| Route and method | Cr064 will be dosed IP at least twice |
| of administration: | a week for at least 3 weeks |
| Justification for route | This route will be used to evaluate |
| of administration: | pharmacologic efficacy in this model. |
| Administered | 1, 5 and 10 mg/kg |
| dose: | |
| Administered | Adjust by body weight, 20 gram mouse/ |
| volume: | 0.2 mls |
| Identity and | 786-0 human renal clear cell |
| lot number: | adenocarcinoma; batch number P1 5IC |
| Physical | Human Renal Clear Cell Adenocarcinoma |
| description: | |
| Source: | ATCC |
| Characterization/ | ATCC |
| certification | |
| Stability/ | Long-term storage in liquid nitrogen. |
| expiration date: | Thawed and cultured for 48 hours before |
| | use. Harvested cells are stored at 4° C. |
| | during transfer between the laboratory to |
| | the Specific Pathogen Free Facility |

[1233] Experimental Design

[1234] After an acclimation period mice will be subcutaneously implanted with 1×1 mm3 fragments of 786-0 tumors. Animals will be randomized and individually identified. Upon tumors reaching a volume of 60-100 mm³ treatment with will begin. Cr064 antibodies will be administered intraperitoneally at the following doses and schedule (Table 1). Mice will be observed daily, tumors and weight will be recorded twice weekly throughout the study period.

TABLE F39a
Study Design

| Group | Number | | Treatment | Volume |
|---|---|---|---|---|
| Number | of Animals | Treatment | Schedule* | (mL) |
| 1 | 10 | Untreated Control | N/A | N/A |
| | females | | | |
| 2 | 10 | 1 mg/kg, IP | EOD × 3 wk | Based on |
| | females | | | weight |
| 3 | 10 | 5 mg/kg, IP | EOD × 3 wk | Based on |
| | females | | | weight |
| 4 | 10 | 10 mg/kg, IP | EOD × 3 wk | Based on |
| | females | | | weight |
| 5 | 10 | 5-FU, | SID, ×5 | Based on |
| | females | 25 mg/kg, IP | | weight |
| 6 | 10 | 3 + 5 | | Based on |
| | females | | | weight |

[1235] TABLE F39b
Study Timeline

| | | 60-100 | | | | |
|---|---|---|---|---|---|---|
| | Day | mm³ | Day | Day | Day | |
| Event | −14 | Tumors | 7 | 14 | 15 | Endpoint |
| Receipt of | X | | | | | |
| animals ^{a} | | | | | | |
| Tumor | | X | | | | |
| Implantation | | | | | | |
| Treatment | | EOD × | | | | |
| | | 3 wk | | | | |
| Body weights | | Daily × | | | 2× wk | |
| | | 14 | | | | |
| Harvest | | | | | X | |
| Tumors | | | | | | |
| Scheduled | | | | | | 2000 mg |
| termination | | | | | | tumors |

[1236] Experimental Procedures

[1237] Tumor bearing animals will be randomized prior to the start of treatment with. Mice will be monitored daily for body condition and health status. Starting at the point where there is a palpable size mass (60-100 mm³) treatment with CR064 will start. The treatment schedule will be 1, 5 or 10 mg/kg, IP, twice daily for 14 days. Throughout the study the animals will be monitored for tumor twice weekly using calipers. Weights will be recorded daily for the treatment period and twice weekly thereafter.

[1238] Tumor volumes will be calculated for all remaining animals as well as body weights. Tumor volumes will be analyzed using the methodology described in the data analysis and reporting section.

[1239] Tumor Implantation

[1240] Tumors will be harvested from healthy tumor-bearing donor animals. The tissues will be homogenized using standard procedures. Cells will be counted and evaluated for viability using trypan blue. Cells will be suspended in serum free media, and a total of 5×10⁶ cells will be subcutaneously implanted in the flank of mice.

[1241] Tumor Measurement and Volume Determination

[1242] Tumor growth will be measured and recorded 3 times a week using a caliper. Length and width will be measured for each tumor. Tumor volume will be determined using the following formula:

$$Tumor Weight ( mg ) = \frac{{w}^{2} \times l}{2}$$

[1243] Clinical Observations/Signs

[1244] Animals will be observed daily for significant clinical signs, moribundity and mortality.

[1245] Animals Found Dead or Moribund

[1246] Percentage of animal mortality and time to death will be recorded for every animal on the study. Mice may be defined moribund and sacrificed if one or more of the following criteria are met:

[1247] 1) Body weight loss of 20% or greater in a 2-week period.

[1248] 2) Tumors that inhibit normal physiological function such as eating, drinking, mobility and ability to urinate and or defecate.

[1249] 3) Tumors that exceed a maximum dimension of 2000 mg as measured by calipers.

[1250] 4) Ulcerated tumors, tumor producing a exudates or bleeding.

[1251] 5) Prolonged diarrhea leading to weight loss.

[1252] 6) Persistent wheezing and respiratory distress

[1253] Animals can also be considered moribund if there is prolonged or excessive pain or distress as defined by clinical observations such as: Prostrate, hunched posture, paralysis/paresis, distended abdomen, ulcerations, abscesses, seizures and/or hemorrhages

[1254] Animals Found Dead or Moribund

[1255] Any adverse effects or unanticipated deaths will be reported to the veterinarian and to CuraGen Corporation immediately.

[1256] Table F40:PE201: Transgenic Mouse Production

[1257] Transgenic expression of a human gene in a mouse is a useful tool to help determine the function of the product of the gene in instances where the resulting protein product(s) bind to and activate equivalent receptors leading to conserved biological function. Transgenic mice expressing a human protein can also be used as tools to study the inhibitory or activating properties of antibodies to the human protein in vivo. The production and molecular characterization of the transgenic mice was performed by Xenogen Transgenics (Cranberry, N.J.).

[1258] Transgenic mice were produced which express CG57094-02 gene driven by the SAP (serum amyeloid P component (SAP) promoter, a gift of Dr. Yamamura, Institute of Molecular Embryology and Genetics, Kumamoto University School of Medicine, Kumamoto, Japan. The promoter drives expression of the gene to produce protein in the liver with slight expression in the postnatal mouse. Mouse embryonic stem cells were microinjected with linearized DNA consisting of the SAP promoter and the downstream gene which encodes CG57094-02. The CG57094-02 sequence is flanked 5′ by an IgK secretory signal sequence and 3′ by DNA encoding V5/His epitopes. Mouse embryos were implanted, and progeny were analyzed for gene integration

[1259] Sharma A, Khoury-Christianson A M, White S P, Dhanial N K, Huang Related Articles, Links W Paulhiac C, Friedman E J, Maniula B N, Kumar R.

[1260] High-efficiency synthesis of human alpha-endorphin and magainin in the erythrocytes of transgenic mice: a production system for therapeutic peptides.

[1261] Proc Natl Acad Sci USA. Sep. 27, 1994;91(20):9337-41.

[1262] Founders (mice which have integrated the gene) were identified by PCR of tail genomic DNA. Sera was drawn from the mouse tail vein at age 4 weeks for serum ELISA to examine protein expression in the circulation for genes for which a secreted product is expected. Serum ELISA was performed using [Curamab/polymab/anti-V5 tag—assay in development] in a two-site format. Serum protein positive mice were bred to obtain lines with relatively homogeneous expression of the protein. These mice can be used for phenotypic analysis or disease modeling to determine the role of the CG57094-02 and functional or PK properties of CR064 mAb.

### Other Embodiments

[1263] Although particular embodiments have been disclosed herein in detail, this has been done by way of example for purposes of illustration only, and is not intended to be limiting with respect to the scope of the appended claims, which follow. In particular, it is contemplated by the inventors that various substitutions, alterations, and modifications may be made to the invention without departing from the spirit and scope of the invention as defined by the claims. The choice of nucleic acid starting material, clone of interest, or library type is believed to be a matter of routine for a person of ordinary skill in the art with knowledge of the embodiments described herein. Other aspects, advantages, and modifications considered to be within the scope of the following claims. The claims presented are representative of the inventions disclosed herein. Other, unclaimed inventions are also contemplated. Applicants reserve the right to pursue such inventions in later claims.

The application's sequence listing, which the Patent Office published only in electronic form, follows.

SEQUENCE LISTING (397 sequences)

SEQ ID NO: 1 - DNA, 968 bp, Homo sapiens
  CDS (1)..(768)
atgggtctggccatggagcagctgtgcgggctgaggcggagccgggcgtttctcgccctgctgggatcgctgctcctctctggggtcctggcggccgaccgagaacgcagcatccacgacttctgcctggtgtcgaaggtggtgggcagatgccgggcctccatgcctaggtggtggtacaatgtcactgacggatcctgccagctgtttgtgtatgggggctgtgacggaaacagcaataattacctgaccaaggaggagtgcctcaagaaatgtgccactgtcacagagaatgccacgggtgacctggccaccagcaggaatgcagcggattcctctgtcccaagtgctcccagaaggcaggattctgaagaccactccagcgatatgttcaactatgaagaatactgcaccgccaacgcagtcactgggccttgccgtgcatccttcccacgctggtactttgacgtggagaggaactcctgcaataacttcatctatggaggctgccggggcaataagaacagctaccgctctgaggaggcctgcatgctccgctgcttccgccagcaggagaatcctcccctgccccttggctcaaaggtggtggttctggcggggctgttcgtgatggtgttgatcctcttcctgggagcctccatggtctacctgatccgggtggcacggaggagccaggagcgtgccctgcgcaccgtctggagctccggagatgacaaggagcagctggtgaagaacacatatgtcctgtgaccgccctgtcgccaagaggactggggaagggaggggagactatgtgtgagctttttttaaatagagggattgactcggatttgagtgatcattagggctgaggtctgtttctctgggaggtaggacggctgcttcctggtctggcagggatgggtttgctttggaaatcctctaggaggctccggcactgacctaag

SEQ ID NO: 2 - protein, 256 aa, Homo sapiens
MGLAMEQLCGLRRSRAFLALLGSLLLSGVLAADRERSIHDFCLVSKVVGRCRASMPRWWYNVTDGSCQLFVYGGCDGNSNNYLTKEECLKKCATVTENATGDLATSRNAADSSVPSAPRRQDSEDHSSDMFNYEEYCTANAVTGPCRASFPRWYFDVERNSCNNFIYGGCRGNKNSYRSEEACMLRCFRQQENPPLPLGSKVVVLAGLFVMVLILFLGASMVYLIRVARRSQERALRTVWSSGDDKEQLVKNTYVL

SEQ ID NO: 3 - DNA, 869 bp, Homo sapiens
  CDS (51)..(821)
gagaccccaacggctggtggcgtcgcctgcgcgtctcggctgagctggccatggcgcagctgtgcgggctgaggcggagccgggcgtttctcgccctgctgggatcgctgctcctctctggggtcctggcggccgaccgagaacgcagcatccacggtgagggccgggcggacttctgcctggtgtcgaaggtggtgggcagatgccgggcctccatgcctaggtggtggcacaatgtcactgacggatcctgccagctgtttgtgtatgggggctgtgacggaaacagcaataattacctgaccaaggaggagtgcctcaagaaatgtgccactgtcacagagaatgccacgggtgacctggccaccagcaggaatgcagcggattcctctgtcccaagtgctcccagaaggcaggattctgaagaccactccagcgatatgttcaactatgaagaatactgcaccgccaacgcagtcactgggccttgccgtgcatccttcccacgctggtactttgacgtggagaggaactcctgcaataacttcatctatggaggctgccggggcaataagaacagctaccgctctgaggaggcctgcatgctccgctgcttccgccagcaggagaatcctcccctgccccttggctcaaaggtggtggttctggcggggctgttcgtgatggtgttgatcctcttcctgggagcctccatggtctacctgatccgggtggcacggaggaaccaggagcgtgccctgcgcaccgtctggagctccggagatgacaaggagcagctggtgaagaacacatatgtcctgtgaccggcctgtcgccaagaggactggggaagggaggggagactatgg

SEQ ID NO: 4 - protein, 257 aa, Homo sapiens
MAQLCGLRRSRAFLALLGSLLLSGVLAADRERSIHGEGRADFCLVSKVVGRCRASMPRWWHNVTDGSCQLFVYGGCDGNSNNYLTKEECLKKCATVTENATGDLATSRNAADSSVPSAPRRQDSEDHSSDMFNYEEYCTANAVTGPCRASFPRWYFDVERNSCNNFIYGGCRGNKNSYRSEEACMLRCFRQQENPPLPLGSKVVVLAGLFVMVLILFLGASMVYLIRVARRNQERALRTVWSSGDDKEQLVKNTYVL

SEQ ID NO: 5 - DNA, 841 bp, Homo sapiens
  CDS (37)..(837)
actggtttcgtggaaggaagctccaggactggcgggatgggctcagcctgtatcaaagtcaccaaatactttctcttcctcttcaacttgatcttctttatcctgggcgcagtgatcctgggcttcggggtgtggatcctggccgacaagagcagtttcatctctgtcctgcaaacctcctccagctcgcttaggatgggggcctatgtcttcatcggcgtgggggcagtcactatgctcatgggcttcctgggctgcatcggcgccgtcaacgaggtccgctgcctgctggggctgtactttgctttcctgctcctgatcctcattgcccaggtgacggccggggccctcttctacttcaacatgggcaagctgaagcaggagatgggcggcatcgtgactgagctcattcgagactacaacagcagtcgcgaggacagcctgcaggatgcctgggactacgtgcaggctcaggtgaagtgctgcggctgggtcagcttctacaactggacagacaacgctgagctcatgaatcgccctgaggtcacctacccctgttcctgcgaagtcaagggggaagaggacaacagcctttctgtgaggaagggcttctgcgaggcccccggcaacaggacccagagtggcaaccaccctgaggactggcctgtgtaccaggagggctgcatggagaaggtgcaggcgtggctgcaggagaacctgggcatcatcctcggcgtgggcgtgggtgtggccatcgtcgagctcctggggatggtcctgtccatctgcttgtgccggcacgtccattccgaagactacagcaaggtccccaagtactgag

SEQ ID NO: 6 - protein, 267 aa, Homo sapiens [sequence omitted]

SEQ ID NO: 7 - DNA, 747 bp, Homo sapiens
  CDS (8)..(724)
ccttgggatgggctcagcctgtatcaaagtcaccaaatactttctcttcctcttcaacttgatcttctttatcctgggcgcagtgatcctgggcttcggggtgtggatcctggccgacaagagcagtttcatctctgtcctgcaaacctcctccagctcgcttaggatgggggcctatgtcttcatcggcgtgggggcagtcactatgctcatgggcttcctgggctgcatcggcgccgtcaacgaggtccgctgcctgctggggctgtactttgctttcctgctcctgatcctcattgcccaggtgacggccggggccctcttctacttcaacatgggcaagctgaagcaggagatgggtggcatcgtgactgagctcattcgagactacaacagcagtcgcgaggacagcctgcaggatgcctgggactacgtgcaggctcaggtgaagtgctgcggctgggtcagcttctacaactggacagacaacgctgagctcatgaatcgccctgaggtcacctacccctgttcctgcgaagtcaagggggaagaggacaacagcctttctgtgaggaagggcttctgcgaggcccccggcaacaggacccagagtggcaaccaccctgaggactggcctgtgtaccaggagctcctggggatggtcctgtccatctgcttgtgccggcacgtccattccgaagactacagcaaggtccccaagtactgaggcagctgctatccccatct

SEQ ID NO: 8 - protein, 239 aa, Homo sapiens
MGSACIKVTKYFLFLFNLIFFILGAVILGFGVWILADKSSFISVLQTSSSSLRMGAYVFIGVGAVTMLMGFLGCIGAVNEVRCLLGLYFAFLLLILIAQVTAGALFYFNMGKLKQEMGGIVTELIRDYNSSREDSLQDAWDYVQAQVKCCGWVSFYNWTDNAELMNRPEVTYPCSCEVKGEEDNSLSVRKGFCEAPGNRTQSGNHPEDWPVYQELLGMVLSICLCRHVHSEDYSKVPKY

SEQ ID NO: 9 - DNA, 486 bp, Homo sapiens
  CDS (1)..(483)
atggcaaaagaggagccccagagtatctcaagggacttgcaggaactgcagaagaagctgtctctgctgatagactccttccagaataactcaaaggtggtggcctttatgaagtctccagtgggtcagtacttggacagccatccgtttctggccttcaccttgctggtgttcattgtcatgtcggccgttcctgttggattcttcctgctcatcgtggtgcttaccaccctggctgctctgctgggggtcataatattggaaggattggtcatctctgtgggtggcttctcactgctctgcatcctctgtggtttgggcttcgtatcactcgccatgtcggggatgatgatagcatcttatgtagtggtctccagcctcatcagctgctggttttctcccaggccactgacacagcaaaacaccagttgtgactttctgccagccatgaagtctgcagacttcgaggggctttaccaggaatga

SEQ ID NO: 10 - protein, 161 aa, Homo sapiens
MAKEEPQSISRDLQELQKKLSLLIDSFQNNSKVVAFMKSPVGQYLDSHPFLAFTLLVFIVMSAVPVGFFLLIVVLTTLAALLGVIILEGLVISVGGFSLLCILCGLGFVSLAMSGMMIASYVVVSSLISCWFSPRPLTQQNTSCDFLPAMKSADFEGLYQE

SEQ ID NO: 11 - DNA, 760 bp, Homo sapiens
  CDS (203)..(757)
ggctccctctcgggacgctctttccttcttcctcttgttcctcctcctgcctctcttcgcttcgcctgcaaacgcggtgggggctgctcggcggtcaggagcagcaagagacagagcgacatgagagattggaccgcgggctgcactggagaatttactggtaggataattcatccctaaagagattgaagtgagcttcagaatggcaaaagaggagccccagagtatctcaagggacttgcaggaactgcagaagaagctgtctctgctgatagactccttccagaataactcaaagctgccccaacacagcaggatctcactggactctgatgatggagtgtccaggctgggcagtgctggctccaaggtggtggcctttatgaagtctccagtgggtcagtacttggacagccatccgtttctggccttcaccttgctggtgttcattgtcatgtcggccgttcctgttggattcttcctgctcatcgtggtgcttaccaccctggctgctctgctgggggtcataatattggaaggattggtcatctctgtgggtggcttctcactgctctgcatcctctgtggtttgggcttcgtatcactcgccatgtcggggatgatgatagcatcttatgtagtggtctccagcctcatcagctgctggttttctcccaggccactgacacagcaaaacaccagttgtgactttctgccagccatgaagtctgcagacttcgaggggctttaccaggaatga

SEQ ID NO: 12 - protein, 185 aa, Homo sapiens
MAKEEPQSISRDLQELQKKLSLLIDSFQNNSKLPQHSRISLDSDDGVSRLGSAGSKVVAFMKSPVGQYLDSHPFLAFTLLVFIVMSAVPVGFFLLIVVLTTLAALLGVIILEGLVISVGGFSLLCILCGLGFVSLAMSGMMIASYVVVSSLISCWFSPRPLTQQNTSCDFLPAMKSADFEGLYQE

SEQ ID NO: 13 - DNA, 1088 bp, Homo sapiens
  CDS (162)..(1055)
gtgagtttacccctatgagactgtgagaggcccggggcctacctcaaaggagcggggtcgcgaagctagctagcagcggcccccctccaggtccccgggcccggcggcgcggcggcggcttggttgtgaagaggcggggaagcgggtgtccggtccccgccatggagggcatggacgtagacctggacccggagctgatgcagaagttcagctgcctgggcaccaccgacaaggacgtgctcatctccgagttccagaggctgctcggcttccagctcaatcctgccggttgcgccttcttcctggacatgaccaactggaacctacaagcagcaattggcgcctattatgactttgagagcccaaacatcagtgtgccctctatgtcctttgttgaagatgtcaccataggagaaggggagtcaatacctccggatactcagtttgtaaaaacatggcggatccagaattctggggcagaggcctggcctccaggggtttgtcttaaatatgtcgggggagaccaatttggacatgtgaacatggtgatggtgagatcgctagagccccaagagattgcagatgtcagcgtccagatgtgcagccccagcagagcaggaatgtatcagggacagtggcggatgtgcactgctacaggactctactatggagatgtcatctgggtgattctcagtgtggaggtgggtggacttttaggagtaacgcagcagctgtcatcttttgaaacggagttcaacacacagccgcatcgtaaggtagaaggaaacttcaacccttttgcctctccccaaaagaaccgacaatcagatgaaaacaacttaaaagaccctgggggctccgagttcgactcgatcagcaaaaacacatgggctcctgctcctgacacatgggctcctgctcctgaccaaactgagcaagaccagaatagactgtcacagaactctgtaaatctgtctcccagcagtcacgcaaacaacttatcagtagtgacttacagtaaggggctccatgggccttaccccttcggccagtcttaaacgggtgtcagcaaaaaaaaaaaaaaaaaa

SEQ ID NO: 14 - protein, 298 aa, Homo sapiens
MEGMDVDLDPELMQKFSCLGTTDKDVLISEFQRLLGFQLNPAGCAFFLDMTNWNLQAAIGAYYDFESPNISVPSMSFVEDVTIGEGESIPPDTQFVKTWRIQNSGAEAWPPGVCLKYVGGDQFGHVNMVMVRSLEPQEIADVSVQMCSPSRAGMYQGQWRMCTATGLYYGDVIWVILSVEVGGLLGVTQQLSSFETEFNTQPHRKVEGNFNPFASPQKNRQSDENNLKDPGGSEFDSISKNTWAPAPDTWAPAPDQTEQDQNRLSQNSVNLSPSSHANNLSVVTYSKGLHGPYPFGQS

SEQ ID NO: 15 - DNA, 735 bp, Homo sapiens
  CDS (31)..(726)
aggcggggaagcgggtgtccggtccccgccatggagggcatggacgtagacctggacccggagctgatgcagaagttcagctgcctgggcaccaccgacaaggacgtgctcatctccgagttccagaggctgctcggcttccagctcaatcctgccggttgcgccttcttcctggacatgaccaactggaacctacaagcagcaattggcgcctattatgactttgagagcccaaacatcagtgtgccctctatgtcctttgttgaagatgtcaccataggagaaggggagtcaatacctccggatactcagtttgtaaaaacatggcggatccagaattctgatgtcatctgggtgattctcagtgtggaggtgggtggacttttaggagtaacgcagcagctgtcatcttttgaaacggagttcaacacacagccgcatcgtaaggtagaaggaaacttcaacccttttgcctctccccaaaagaaccgacaatcagatgaaaacaacttaaaagaccctgggggctccgagttcgactcgatcagcaaaaacacatgggctcctgctcctgacacatgggctcctgctcctgaccaaactgagcaagaccagaatagactgtcacagaactctgtaaatctgtctcccagcagtcacgcaaacaacttatcagtagtgacttacagtaaggggctccatgggccttaccccttcggccagtcttaaacgggt

SEQ ID NO: 16 - protein, 232 aa, Homo sapiens
MEGMDVDLDPELMQKFSCLGTTDKDVLISEFQRLLGFQLNPAGCAFFLDMTNWNLQAAIGAYYDFESPNISVPSMSFVEDVTIGEGESIPPDTQFVKTWRIQNSDVIWVILSVEVGGLLGVTQQLSSFETEFNTQPHRKVEGNFNPFASPQKNRQSDENNLKDPGGSEFDSISKNTWAPAPDTWAPAPDQTEQDQNRLSQNSVNLSPSSHANNLSVVTYSKGLHGPYPFGQS

SEQ ID NO: 17 - DNA, 3544 bp, Homo sapiens
  CDS (81)..(3383)
acatgccccgtttgctgcctgaacctctccacaaagactcccagatcctgaattgaatttaatcatctcctgacaaaagaatgcaatttcaactgaccctttttttgcaccttgggtggctcagttactcaaaagctcaagatgactgcaacaggggtgcctgtcatcccaccactggtgatctcctggtgggcaggaacacgcagcttatggcttcttctacctgtgggctgagcagagcccagaaatactgcatcctcagttacctggagggggaacaaaaatgctccatctgtgactctagatttccatatgatccgtatgaccaacccaacagccacaccattgagaatgtcactgtaagttttgaaccagacagagaaaagaaatggtggcaatctgaaaatggtcttgatcatgtcagcatcagactggacttagaggcattatttcggttcagccaccttatcctgacctttaagacttttcggcctgctgcaatgttagttgaacgttccacagactatggacacaactggaaagtgttcaaatattttgcaaaagactgtgccacttcctttcctaacatcacatctggccaggcccagggagtgggagacattgtttgtgactccaaatactcggatattgaaccctcaacaggtggagaggttgttttaaaagttttggatcccagttttgaaattgaaaacccttatagcccctacatccaagaccttgtgacattgacaaacctgaggataaactttaccaagctccacacccttggggatgctttgcttggaaggaggcaaaatgattcccttgataaatactactatgctctgtacgagatgattgttcggggaagctgcttttgcaatggccatgctagcgaatgtcgccctatgcagaagatgcggggagatgttttcagccctcctggaatggttcacggtcagtgtgtgtgtcagcacaatacagatggtccgaactgtgagagatgcaaggacttcttccaggatgctccttggaggccagctgcagacctccaggacaacgcttgcagatcgtgcagctgtaatagccactccagccgctgtcactttgacatgactacgtacctggcaagcggtggcctcagcgggggcgtgtgtgaagactgccagcacaacactgaggggcagcactgcgaccgctgcagacccctcttctacagggacccgctcaagaccatctcagatccctacgcgtgcattccttgtgaatgtgaccccgatgggaccatatctggtggcatttgtgtgagccactctgatcctgccttagggtctgtggccggccagtgcctttgtaaagagaacgtggaaggagccaaatgcgaccagtgcaaacccaaccactacggactaagcgccaccgaccccctgggctgccagccctgcgactgtaacccccttgggagtctgccattcttgacctgtgatgtggatacaggccaatgcttgtgcctgtcatatgtcaccggagcacactgcgaagaatgcactgttggatactggggcctgggaaatcatctccatgggtgttctccctgtgactgtgatattggaggtgcttattctaacgtgtgctcacccaagaatgggcagtgtgaatgccgcccacatgtcactggccgtagctgctctgaaccagcccctggctacttctttgctcctttgaatttctatctctacgaggcagaggaagccacaacactccaaggactggcgcctttgggctcggagacgtttggccagagtcctgctgttcacgttgttttaggagagccagttcctgggaaccctgttacatggactggacctggatttgccagggttctccctggggctggcttgagatttgctgtcaacaacattccctttcctgtggacttcaccattgccattcactatgaaacccagtctgcagctgactggactgtccagattgtggtgaacccccctggagggagtgagcactgcatacccaagactctacagtcaaagcctcagtcttttgccttaccagcggctacgagaatcatgctgcttcccacacccatctgtttagaaccagatgtacaatattccatagatgtctatttttctcagcctttgcaaggagagtcccacgctcattcacatgtcctggtggactctcttggccttattccccaaatcaattcattggagaatttctgcagcaagcaggacttagatgagtatcagcttcacaactgtgttgaaattgcctcagcaatgggacctcaagtgctcccgggtgcctgtgaaaggctgatcatcagcatgtctgccaagctgcatgatggggctgtggcctgcaagtgtcacccccagggctcagtcggatccagctgcagccgacttggaggccagtgccagtgtaaacctcttgtggtcgggcgctgctgtgacaggtgctcaactggaagctatgatttggggcatcacggctgtcacccatgtcactgccatcctcaaggatcaaaggacactgtatgtgaccaagtaacaggacagtgcccctgccatggagaggtgtctggccgccgctgtgatcgctgcctggcaggctactttggatttcccagctgccacccttgcccttgtaataggtttgctgaactttgtgatcctgagacagggtcatgcttcaattgtggaggctttacaactggcagaaactgtgaaaggtgtattgatggttactatggaaatccttcttcaggacagccctgtcgtccttgcctgtgtccagatgatccctcaagcaatcagtattttgcccattcctgttatcagaatctgtggagctcagatgtaatctgcaattgtcttcaaggttatacgggtactcagtgtggagaatgctctactggtttctatggaaatccaagaatttcaggagcaccttgccaaccatgtgcctgcaacaacaacatagatgtaaccgatccagagtcctgcagccgggtaacaggggagtgccttcgatgtttgcacaacactcagggcgcaaactgccagctctgcaaaccaggtcactatggatcagccctcaatcagacctgcagaagatgctcctgccatgcttccggcgtgagtcccatggagtgtccccctggtgggggagcttgcctctgtgaccctgtcactggtgcatgtccttgtctgccgaatgtcacaggcctggcctgtgaccgttgtgctgatggatactggaatctggtccctggcagaggatgtcagtcatgtgactgtgaccctaggacctctcaaagtagccactgtgaccaggcaagatactttaaagcttactagtgcactcaaagtgagcatgatagtgagacatggtttctaaatgtgtaaagaaagtttcttttatgtactgttgttaattagtgcattgaaacaggggtggccttacaggggatggagtcagcctctatcaaggaatgaaaaccaaaaaaagagaatga

SEQ ID NO: 18 - protein, 1101 aa, Homo sapiens
MQFQLTLFLHLGWLSYSKAQDDCNRGACHPTTGDLLVGRNTQLMASSTCGLSRAQKYCILSYLEGEQKCSICDSRFPYDPYDQPNSHTIENVTVSFEPDREKKWWQSENGLDHVSIRLDLEALFRFSHLILTFKTFRPAAMLVERSTDYGHNWKVFKYFAKDCATSFPNITSGQAQGVGDIVCDSKYSDIEPSTGGEVVLKVLDPSFEIENPYSPYIQDLVTLTNLRINFTKLHTLGDALLGRRQNDSLDKYYYALYEMIVRGSCFCNGHASECRPMQKMRGDVFSPPGMVHGQCVCQHNTDGPNCERCKDFFQDAPWRPAADLQDNACRSCSCNSHSSRCHFDMTTYLASGGLSGGVCEDCQHNTEGQHCDRCRPLFYRDPLKTISDPYACIPCECDPDGTISGGICVSHSDPALGSVAGQCLCKENVEGAKCDQCKPNHYGLSATDPLGCQPCDCNPLGSLPFLTCDVDTGQCLCLSYVTGAHCEECTVGYWGLGNHLHGCSPCDCDIGGAYSNVCSPKNGQCECRPHVTGRSCSEPAPGYFFAPLNFYLYEAEEATTLQGLAPLGSETFGQSPAVHVVLGEPVPGNPVTWTGPGFARVLPGAGLRFAVNNIPFPVDFTIAIHYETQSAADWTVQIVVNPPGGSEHCIPKTLQSKPQSFALPAATRIMLLPTPICLEPDVQYSIDVYFSQPLQGESHAHSHVLVDSLGLIPQINSLENFCSKQDLDEYQLHNCVEIASAMGPQVLPGACERLIISMSAKLHDGAVACKCHPQGSVGSSCSRLGGQCQCKPLVVGRCCDRCSTGSYDLGHHGCHPCHCHPQGSKDTVCDQVTGQCPCHGEVSGRRCDRCLAGYFGFPSCHPCPCNRFAELCDPETGSCFNCGGFTTGRNCERCIDGYYGNPSSGQPCRPCLCPDDPSSNQYFAHSCYQNLWSSDVICNCLQGYTGTQCGECSTGFYGNPRISGAPCQPCACNNNIDVTDPESCSRVTGECLRCLHNTQGANCQLCKPGHYGSALNQTCRRCSCHASGVSPMECPPGGGACLCDPVTGACPCLPNVTGLACDRCADGYWNLVPGRGCQSCDCDPRTSQSSHCDQARYFKAY

SEQ ID NO: 19 - DNA, 2265 bp, Homo sapiens
  CDS (293)..(1939)
acttccaggtgggagtgcgtgggcgggggagctggagccgagcgccgccgccgaagcttccgtctcgctcgctcgcgcagcggcggcagcagaggtcgcgcacagatgcgggttagactggcggggggaggaggcggaggagggaaggaagctgcatgcatgagacccacagcgcagagaaatctcactggggactggggcagtaggatcgatcccaatcccgaggaaaaccagagaagtagctgggggagacggtgccacattactcttgcaagctggatgccctctgtggatgaaagatgtatcatggaatgaacccgagcaatggagatggatttctagagcagcagcagcagcagcagcaacctcagtccccccagagactcttggccgtgatcctgtggtttcagctggcgctgtgcttcggccctgcacagctcacgggcggaccggggtggcctcaagaaactcacaatcatggcagaagggaaagcaaacgcatccttcttcacatggcggcagcaaggagaagtgcagagagagaagaaagtcccttataaaaccatcagacctcatgagaactcattcactatcacaagaacagcatggagggttcgatgaccttcaagtgtgtgctgaccccggcattcccgagaatggcttcaggacccccagcggaggggttttctttgaaggctctgtagcccgatttcactgccaagacggattcaagctgaagggcgctacaaagagactgtgtttgaagcattttaatggaaccctaggctggatcccaagtgataattccatctgtgtgcaagaagattgccgtatccctcaaatcgaagatgctgagattcataacaagacatatagacatggagagaagctaatcatcacttgtcatgaaggattcaagatccggtaccccgacctacacaatatggtttcattatgtcgcgatgatggaacgtggaataatctgcccatctgtcaaggctgcctgagacctctagcctcttctaatggctatgtaaacatctctgagctccagacctccttcccggtggggactgtgatctcctatcgctgctttcccggatttaaacttgatgggtctgcgtatcttgagtgcttacaaaaccttatctggtcgtccagcccaccccggtgccttgctctggaagcccaagtctgtccactacctccaatggtgagtcacggagatttcgtctgccacccgcggccttgtgagcgctacaaccacggaactgtggtggagttttactgcgatcctggctacagcctcaccagcgactacaagtacatcacctgccagtatggagagtggtttccttcttatcaagtctactgcatcaaatcagagcaaacgtggcccagcacccatgagaccctcctgaccacgtggaagattgtggcgttcacggcaaccagtgtgctgctggtgctgctgctcgtcatcctggccaggatgttccagaccaagttcaaggcccactttccccccagggggcctccccggagttccagcagtgaccctgactttgtggtggtagacggcgtgcccgtcatgctcccgtcctatgacgaagctgtgagtggcggcttgagtgccttaggccccgggtacatggcctctgtgggccagggctgccccttacccgtggacgaccagagccccccagcataccccggctcaggggacacggacacaggcccaggggagtcagaaacctgtgacagcgtctcaggctcttctgagctgctccaaagtctgtattcacctcccaggtgccaagagagcacccaccctacttcggacaaccctgacataattgccagcacggcagaggaggtggcatccaccagcccaggcatcgacattgcagatgagattcctctaatggaagaagatccctaatatgggtcaagatccagatgactctcctgctccttcggggaaaggaccttgtatcttggagtgaggtcacagaaggatagagcctgggggcaaaatgtctaacttgtctacatggggaccacagttcacattatgcatctcaggctccacagtgaggctgacaaactgcaatggcagtgcttttaaatgagatttgaggattcaccaagacccatggggaaccggggcagcagggaagccctcgcgtggtcttggatgaggggtgttaaatgtgtatcgtgctgtggaacatgggacaattccacgcactcccacctggaagt

SEQ ID NO: 20 - protein, 549 aa, Homo sapiens
MKDVSWNEPEQWRWISRAAAAAAATSVPPETLGRDPVVSAGAVLRPCTAHGRTGVASRNSQSWQKGKQTHPSSHGGSKEKCRERRKSLIKPSDLMRTHSLSQEQHGGFDDLQVCADPGIPENGFRTPSGGVFFEGSVARFHCQDGFKLKGATKRLCLKHFNGTLGWIPSDNSICVQEDCRIPQIEDAEIHNKTYRHGEKLIITCHEGFKIRYPDLHNMVSLCRDDGTWNNLPICQGCLRPLASSNGYVNISELQTSFPVGTVISYRCFPGFKLDGSAYLECLQNLIWSSSPPRCLALEAQVCPLPPMVSHGDFVCHPRPCERYNHGTVVEFYCDPGYSLTSDYKYITCQYGEWFPSYQVYCIKSEQTWPSTHETLLTTWKIVAFTATSVLLVLLLVILARMFQTKFKAHFPPRGPPRSSSSDPDFVVVDGVPVMLPSYDEAVSGGLSALGPGYMASVGQGCPLPVDDQSPPAYPGSGDTDTGPGESETCDSVSGSSELLQSLYSPPRCQESTHPTSDNPDIIASTAEEVASTSPGIDIADEIPLMEEDP

SEQ ID NO: 21 - DNA, 1089 bp, Homo sapiens
  CDS (19)..(1071)
ggctgtgggtgcttcactatggcgacggtgggggctccgcggcacttctgccgctgcgcctgcttctgcaccgataacttgtacgtggcgcgctatgggctgcacgtgcgcttccgaggcgagcagcagctgcgccgggactacggccagatcctgcgcagccgaggctgtgttagcgccaaggacttccagcagctgttagcagaggtacttgagcaggaggtggagcggcggcagcggctggggcaggagtcagcagctaggaaagccctcatcgcgagttcctaccacccggcacggcctgaggtctacgactcactgcaggatgcagctctggcccccgagttcctggccgtgactgagtacagcgtgtccccagacgcagacctcaagggccttctccagcggctggagacagtatcggaggagaagcgcatctaccgggtgcctgttttcacagcgcccttctgccaggccctgctggaagagctggagcacttcgagcaatcggacatgcctaaggggaggcccaacaccatgaacaactacggggtgctgctgcacgagctcgggctggacgagccgctgatgacaccactgcgggagcgcttcctgcagccgctgatggccctgctgtaccctgactgtggcgggggccggctcgacagccaccgggcctttgtggtcaaatacgcaccgggccaggacctggagctgggctgccactatgataatgccgagctcaccctcaatgtggccttgggcaaggtcttcacagggggcgccctgtattttgggggcctcttccaggcacccacagccctgacggagcccctggaggtggagcacgtggtgggccagggtgtcctccaccgtggcggccagctgcatggagcccggcccttgggcactggtgagcgttggaaccttgtcgtctggctccgagcctctgctgtgcgcaacagcctctgtcccatgtgctgccgtgagcccgacctggtggacgatgagggcttcggtgatggcttcacccgagaggagcccgccacggtggatgtatgtgcgctcacctgagcttgcttgggccca

SEQ ID NO: 22 - protein, 351 aa, Homo sapiens
MATVGAPRHFCRCACFCTDNLYVARYGLHVRFRGEQQLRRDYGQILRSRGCVSAKDFQQLLAEVLEQEVERRQRLGQESAARKALIASSYHPARPEVYDSLQDAALAPEFLAVTEYSVSPDADLKGLLQRLETVSEEKRIYRVPVFTAPFCQALLEELEHFEQSDMPKGRPNTMNNYGVLLHELGLDEPLMTPLRERFLQPLMALLYPDCGGGRLDSHRAFVVKYAPGQDLELGCHYDNAELTLNVALGKVFTGGALYFGGLFQAPTALTEPLEVEHVVGQGVLHRGGQLHGARPLGTGERWNLVVWLRASAVRNSLCPMCCREPDLVDDEGFGDGFTREEPATVDVCALT

SEQ ID NO: 23 - DNA, 1075 bp, Homo sapiens
  CDS (14)..(1063)
caccggatccaccatggcgacggtgggggctccgcggcacttctgccgctgcgcctgcttctgcaccgataacttgtacgtggcgcgctatgggctgcacgtgcgcttccgaggcgagcagcagctgcgccgggactacggcccgatcctgcgcagccgaggctgtgttagcgccaaggacttccagcagctgttagcagagcttgagcaggaggtggagcggcggcagcggctggggcaggagtcagcagctaggaaagccctcatcgcgagttcctaccacccggcacggcctgaggtctacgactcactgcaggatgcagctctggcccccgagttcctggccgtgactgagtacagcgtgtccccagacgcagacctcaagggccttctccagcggctggagacagtatcggaggagaagcgcatctaccgggtgcctgttttcacagcgcccttctgccaggccctgctggaagagctggagcacttcgagcaatcggacatgcctaaggggaggcccaacaccatgaacaactacggggtgctgctgcacgagctcgggctggacgagccgctgatgacaccactgcgggagcgcttcctgcagccgctgatggccctgctgtaccctgactgtggcgggggccggctcgacagccaccgggcctttgtggtcaaatacgcaccgggccaggacctggagctgggctgccactatgataatgccgagctcaccctcaatgtggccttgggcaaggtcttcacagggggcgccctgtattttgggggcctcttccaggcacccacagccctgacggagcccctggaggtggagcacgtggtgggccagggtgtcctccaccgtggcggccagctgcatggagcccggcccttgggcactggtgagcgttggaaccttgtcgtctggctccgagcctctgctgtgcgcaacagcctctgtcccatgtgctgccgtgagcccgacctggtggacgatgagggcttcggtgatggcttcacccgagaggagcccgccacggtggatgtatgtgcgctcacctaggtcgacggc

SEQ ID NO: 24 - protein, 350 aa, Homo sapiens
MATVGAPRHFCRCACFCTDNLYVARYGLHVRFRGEQQLRRDYGPILRSRGCVSAKDFQQLLAELEQEVERRQRLGQESAARKALIASSYHPARPEVYDSLQDAALAPEFLAVTEYSVSPDADLKGLLQRLETVSEEKRIYRVPVFTAPFCQALLEELEHFEQSDMPKGRPNTMNNYGVLLHELGLDEPLMTPLRERFLQPLMALLYPDCGGGRLDSHRAFVVKYAPGQDLELGCHYDNAELTLNVALGKVFTGGALYFGGLFQAPTALTEPLEVEHVVGQGVLHRGGQLHGARPLGTGERWNLVVWLRASAVRNSLCPMCCREPDLVDDEGFGDGFTREEPATVDVCALT

SEQ ID NO: 25 - DNA, 1051 bp, Homo sapiens
  CDS (47)..(1015)
gaaccagtagccgcggctgcttctgttgccgcggtcggtggtcgttatggattctccatgggacgagttggctctggccttctcccgcacgtccatgtttcccttttttgacatcgcgcactatctagtgtcagtgatggcggtgaaacgtcagccgggagcagctgcattggcatggaagaatcctatttcaagctggtttactgctatgctccactgttttggtggaggaattttatcctgtctactgcttgcagagcctccattgaagtttcttgcaaaccacactaacatattactggcatcttcaatctggtatattacatttttttgcccgcatgacctagtttcccagggctattcatatctacctgttcaactactggcttcgggaatgaaggaagtgaccagaacttggaaaatagtaggtggagtcacacatgctaatagctattacaaaaatggctggatagtcatgatagctattggatgggcccgaggtgcgggtggtaccattataacgaattttgagaggttggtaaaaggagattggaaaccagaaggtgatgaatggctgaagacgtcatattttagggtacatgtgcagaacgtgcaggtttgttacatatgtatacatgtgccatgttggtgtgctacacccattaactcgtcatttaacattagccctgccaaggtaaccctgctggggtcagttatcttcacattccagcacacccagcatctggcaatatcaaagcataatcttatgttcctttataccatctttattgtggccacaaagataaccatgatgactacacagacttctactatgacatttgctccttttgaggatacattgagttggatgctatttggctggcagcagccgttttcatcatgtgagaagaaaagtgaagcaaagtcaccttccaatggcgttgggtcattggcctcaaagccggtagatgttgcctcagataatgttaaaaagaaacatactaagaagaatgaataatttacgtgatgagctctacaaggccaaaaattt

SEQ ID NO: 26 - protein, 323 aa, Homo sapiens [sequence omitted]

SEQ ID NO: 27 - DNA, 823 bp, Homo sapiens
  CDS (107)..(778)
gaatcgcccttctgccagcttagtggaagctctgctctgggtggagagcagcctcgctttggtgacgcacagtgctgggaccctccaggagccccgggattgaaggatggtggcggccgtcctgctggggctgagctggctctgctctcccctgggagctctggtcctggacttcaacaacatcaggagctctgctgacctgcatggggcccggaagggctcacagtgcctgtctgacacggactgcaataccagaaagttctgcctccagccccgcgatgagaagccgttctgtgctacatgtcgtgggttgcggaggaggtgccagcgagatgccatgtgctgccccgggacactctgtgtgaacgatgtttgtactacgatggaagatgcaaccccaatattagaaaggcagcttgatgagcaagatggcacacatgcagaaggaacaactgggcacccagtccaggaaagccaactcaaaaggaagccaagtattaagaaatcacaaggcaggaagggacaagagggagaaagttgtctgagaacttttgactgtggccctggactttgctgtgctcgtcatttttggacgaaaatttgtaagccagtccttttggagggacaggtctgctccagaagagggcataaagacactgctcaagctccagaaatcttccagcgttgcgactgtggccctggactactgtgtcgaagccaattgaccagcaatcggcagcatgctcgattaagagtatgccaaaaaatagaaaagctatagatatttcaaaataaagaagaatccacatgcaaaggcgattca

SEQ ID NO: 28 - protein, 224 aa, Homo sapiens
MVAAVLLGLSWLCSPLGALVLDFNNIRSSADLHGARKGSQCLSDTDCNTRKFCLQPRDEKPFCATCRGLRRRCQRDAMCCPGTLCVNDVCTTMEDATPILERQLDEQDGTHAEGTTGHPVQESQLKRKPSIKKSQGRKGQEGESCLRTFDCGPGLCCARHFWTKICKPVLLEGQVCSRRGHKDTAQAPEIFQRCDCGPGLLCRSQLTSNRQHARLRVCQKIEKL

SEQ ID NO: 29 - DNA, 630 bp, Homo sapiens
  CDS (67)..(585)
tggagagcagcctcgctttggtgacgcacagtgctgggaccctccaggagccccgggaattgaaggatggtggcggccgtcctgctggggctgagctggctctgctctcccctgggagctctggtcctggacttcaacaacatcaggagctctgctgacctgcatggggcccggaagggctcacagtgcctgtctgacacggactgcaataccagaaagttctgcctccagccccgcgatgagaagccgttctgtgctacatgtcgtgggttgcggaggaggtgccagcgagacgccatgtgctgccctgggacactctgtgtgaacggacaagagggagaaagttgtctgagaacttttgactgtggccctggactttgctgtgctcgtcatttttggacgaaaatttgtaagccagtccttttggagggacaggtctgctccagaagagggcataaagacactgctcaagctccagaaatcttccagcgttgcgactgtggccctggactactgtgtcgaagccaattggccagcaatcggcagcatgctcgattaagagtatgccaaaaaatagaaaagctataaatatttcaaaataaagaagatccacatgcaaaggcgattcca

SEQ ID NO: 30 - protein, 173 aa, Homo sapiens
MVAAVLLGLSWLCSPLGALVLDFNNIRSSADLHGARKGSQCLSDTDCNTRKFCLQPRDEKPFCATCRGLRRRCQRDAMCCPGTLCVNGQEGESCLRTFDCGPGLCCARHFWTKICKPVLLEGQVCSRRGHKDTAQAPEIFQRCDCGPGLLCRSQLASNRQHARLRVCQKIEKL

SEQ ID NO: 31 - DNA, 484 bp, Homo sapiens
  CDS (2)..(484)
caccggatccctggtcctggacttcaacaacatcaggagctctgctgacctgcatggggcccggaagggctcacagtgcctgtctgacacggactgcaataccagaaagttctgcctccagccccgcgatgagaagccgttctgtgctacatgtcgtgggttgcggaggaggtgccagcgagacgccatgtgctgccctgggacactctgtgtgaacggacaagagggagaaagttgtctgagaacttttgactgtggccctggactttgctgtgctcgtcatttttggacgaaaatttgtaagccagtccttttggagggacaggtctgctccagaagagggcataaagacactgctcaagctccagaaatcttccagcgttgcgactgtggccctggactactgtgtcgaagccaattggccagcaatcggcagcatgctcgattaagagtatgccaaaaaatagaaaagctactcgagggc

SEQ ID NO: 32 - protein, 161 aa, Homo sapiens
TGSLVLDFNNIRSSADLHGARKGSQCLSDTDCNTRKFCLQPRDEKPFCATCRGLRRRCQRDAMCCPGTLCVNGQEGESCLRTFDCGPGLCCARHFWTKICKPVLLEGQVCSRRGHKDTAQAPEIFQRCDCGPGLLCRSQLASNRQHARLRVCQKIEKLLEG

SEQ ID NO: 33 - DNA, 541 bp, Homo sapiens
  CDS (2)..(541)
caccggatccaccatggtggcggccgtcctgctggggctgagctggctctgctctcccctgggagctctggtcctggacttcaacaacatcaggagctctgctgacctgcatggggcccggaagggctcacagtgcctgtctgacacggactgcaataccagaaagttctgcctccagccccgcgatgagaagccgttctgtgctacatgtcgtgggttgcggaggaggtgccagcgagacgccatgtgctgccctgggacactctgtgtgaacggacaagagggagaaagttgtctgagaacttttgactgtggccctggactttgctgtgctcgtcatttttggacgaaaatttgtaagccagtccttttggagggacaggtctgctccagaagagggcataaagacactgctcaagctccagaaatcttccagcgttgcgactgtggccctggactactgtgtcgaagccaattggccagcaatcggcagcatgctcgattaagagtatgccaaaaaatagaaaagctactcgagggc

SEQ ID NO: 34 - protein, 180 aa, Homo sapiens
TGSTMVAAVLLGLSWLCSPLGALVLDFNNIRSSADLHGARKGSQCLSDTDCNTRKFCLQPRDEKPFCATCRGLRRRCQRDAMCCPGTLCVNGQEGESCLRTFDCGPGLCCARHFWTKICKPVLLEGQVCSRRGHKDTAQAPEIFQRCDCGPGLLCRSQLASNRQHARLRVCQKIEKLLEG

SEQ ID NO: 35 - DNA, 878 bp, Homo sapiens
  CDS (1)..(834)
atgccgcgcttgtctctgctcttgccgctgctgcttctgctgctgctgccgctgctgccgccgctgtccccgagccttgggatccgcgacgtgggcggccggcgccccaagtgtggtccgtgccggccagagggctgcccggcgcctgcgccctgcccggcgcccgggatctcggcgctcgacgagtgcggctgctgcgcccgctgcctgggagccgagggcgcgagctgcgggggccgcgccggcgggcgctgtggccccggcctggtatgcgcgagccaggccgctggggcagcgcccgagggcaccgggctctgcgtgtgcgcgcagcgcggcaccgtctgcggctccgacggtcgctcgtaccccagcgtctgcgcgctgcgcctgcgcgctcggcacacgccccgcgcgcaccccggtcacctgcacaaggcgcgcgacggcccttgcgagttcgctcctgtggtcgtcgttcctccccgaagtgttcacaacgtcaccggggcgcaggtgggcctgtcctgtgaagtgagggctgtgcctaccccagtcatcacgtggagaaaggtaacgaagtcccctgagggcacccaagcactggaggagctgcctggggaccatgtcaatatagctgtccaagtgcgagggggcccttctgaccatgaggccacggcctggattttgatcaaccccctgcgaaaggaggatgagggtgtgtaccagtgccatgcagccaacatggtgggagaggctgagtcccacagcacagtgacggttctagatctgagtaaatacaggagcttccacttcccagctcccgatgaccgcatgtgatggagaaatgtacatgttctaagtcattttcagtattttac

SEQ ID NO: 36 - protein, 278 aa, Homo sapiens
MPRLSLLLPLLLLLLLPLLPPLSPSLGIRDVGGRRPKCGPCRPEGCPAPAPCPAPGISALDECGCCARCLGAEGASCGGRAGGRCGPGLVCASQAAGAAPEGTGLCVCAQRGTVCGSDGRSYPSVCALRLRARHTPRAHPGHLHKARDGPCEFAPVVVVPPRSVHNVTGAQVGLSCEVRAVPTPVITWRKVTKSPEGTQALEELPGDHVNIAVQVRGGPSDHEATAWILINPLRKEDEGVYQCHAANMVGEAESHSTVTVLDLSKYRSFHFPAPDDRM

SEQ ID NO: 37 - DNA, 1245 bp, Homo sapiens
  CDS (90)..(1091)
caggaacgggctccgcggacgacgggctccaggcacgcacaggcagcgggcctcccaccgcgggtgccgggggcgggggggctgcccccatgcggggcccttcctggttgcggcctcggccgctgctgctgctgttgctgctgctgtcgccttggcctgtctgggcccatgtgtcggccacggcctcgccctcggggtccctgggcgccccggactgccccgaggtgtgcacgtgcgtgccgggaggcctggccagctgctcggcactctcgctgcccgccgtgcccccgggcctgagcctgcgcctgcgcgcgctgctgctggaccacaaccgcgtccgtgcgctgccgccaggtgccttcgcgggagcgggcgcgctacagcgcctggacctgcgcgagaacgggctgcactcggtgcatgtgcgagccttctggggcctgggcgcgctgcagctgctggacctgagcgccaaccagctggaagcactggcaccagggactttcgcgccgctgcgcgcgctgcgcaacctctcattggccggcaaccggctggcgcgcctggagcccgcggcgctaggcgcgctcccgctgctgcgctcactcagcctgcaggacaacgagctggcggcactcgcgccggggctgctgggccgcctgcccgctctagacgcgctgcacctgcgcggcaacccttggggctgcgggtgcgcgctgcgcccgctctgcgcctggctgcgccggcacccgctgcccgcgtcagaggccgagacggtgctctgcgtgtggccgggacgcctgacgctcagccccctgactgccttttccgacgccgcctttagccattgcgcgcagccgctcgccctgcgggacctggccgtggtttacacgctcgggccggcctccttcctcgtcagcctggcttcctgcctggcgctgggctctgggctcaccgcctgccgtgcgcgccgccgccgcctccgcaccgccgccctccgcccgccgagaccgccagacccgaaccccgatcccgacccccacggctgtgcctcgcccgcggacccggggagccccgccgctgccgcccaagcctgagcggccgcggccgcctggagcgctcgaagcttcccccatgcctttgccctccctttacactgtctgccggcgtcaacaagcgacacagaccgaaaaaaaaagaaaaaaaaaaaaaaaaaaaaaaaaaaaaaaaaaaaaaaaacaaaaaatt

SEQ ID NO: 38 - protein, 334 aa, Homo sapiens [sequence omitted]

SEQ ID NO: 39 - DNA, 838 bp, Homo sapiens
  CDS (100)..(735)
tcaaaggaaactgacaaattatccccagctgccagaagaagaaatcctcactggacggcttcctgtttcctgtggttcattatctgattggctgcagggatgaaagtttttaagttcataggactgatgatcctcctcacctctgcgctttcagccggttcaggacaaagtccaatgactgtgctgtgctccatagactggttcatggtcacagtgcaccccttcatgctaaacaacgatgtgtgtgtacactttcatgaactacacttgggcctgggttgccccccaaaccatgttcagccacacgcctaccagttcacctaccgtgttactgaatgtggcatcagggccaaagctgtctctcaggacatggttatctacagcactgagatacactactcttctaagggcacgccatctaagtttgtgatcccagtgtcatgtgctgccccccaaaagtccccatggctcaccaagccctgctccatgagagtagccagcaagagcagggccacagcccagaaggatgagaaatgctacgaggtgttcagcttgtcacagtccagtcaaaggcccaactgcgattgtccaccttgtgtcttcagtgaagaagagcatacccaggtcccttgtcaccaagcaggggctcaggaggctcaacctctgcagccatctcactttcttgatatttctgaggattggtctcttcacacagatgatatgattgggtccatgtgatcctcaggtttggggtctcctgaagatgctatttctagaattagtatatagtgtacaaatgtctgacaaataagtgctcttgtgaccctcattaaggcga

SEQ ID NO: 40 - protein, 212 aa, Homo sapiens
MKVFKFIGLMILLTSALSAGSGQSPMTVLCSIDWFMVTVHPFMLNNDVCVHFHELHLGLGCPPNHVQPHAYQFTYRVTECGIRAKAVSQDMVIYSTEIHYSSKGTPSKFVIPVSCAAPQKSPWLTKPCSMRVASKSRATAQKDEKCYEVFSLSQSSQRPNCDCPPCVFSEEEHTQVPCHQAGAQEAQPLQPSHFLDISEDWSLHTDDMIGSM

SEQ ID NO: 41 - DNA, 697 bp, Homo sapiens
  CDS (100)..(588)
tcaaaggaaactgacaaattatccccagctgccaaaagaagaaatcctcactggacggcttcctgtttcctgtggttcattatctgattggctgcagggatgaaagtttttaagttcataggactgatgatcctcctcacctctgcgttttcagccggttcaggacaaagtccaatgactgtgctgtgctccatagactggttcatggtcacagtgcaccccttcatgctaaacaacgatgtgtgtgtacactttcatgaactacacttgggcctgggttgccccccaaaccatgttcagccacacgcctaccagttcacctaccgtgttactgaatgtggcatcagggccagcaagagcagggccacagcccagaaggatgagaaatgctacgaggtgttcagcttgtcacagtccagtcaaaggcccaactgcgattgtccaccttgtgtcttcagtgaagaagagcatacccaggtcccttgtcaccaagcaggggctcaggaggctcaacctctgcagccatctcactttcttgatatttctgaggattggtctcttcacacagatgatatgattgggtccatgtgatcctcaggtttggggtctcctgaagatgctatttctagaattagtatatagtgtacaaatgtctgacaaataagtgctcttgtgaccctcatgtaagggcgattcc

SEQ ID NO: 42 - protein, 163 aa, Homo sapiens
MKVFKFIGLMILLTSAFSAGSGQSPMTVLCSIDWFMVTVHPFMLNNDVCVHFHELHLGLGCPPNHVQPHAYQFTYRVTECGIRASKSRATAQKDEKCYEVFSLSQSSQRPNCDCPPCVFSEEEHTQVPCHQAGAQEAQPLQPSHFLDISEDWSLHTDDMIGSM

SEQ ID NO: 43 - DNA, 1103 bp, Homo sapiens
  CDS (31)..(999)
  misc_feature (28)..(28): Wherein n may be a, c, g or t
aagcaggctggtacgccctggagttaanggatggctgcgggtttggcggcgctgcgccggcaggcagcgaggccgggtcgggccctgggccctcgcgcccctcccgcgaggcctgtcatgcagggccccgccgggaacgcgagccggggactgccaggcgggccgccctccacagtcgcgtccggggcgggccgctgcgagagcggcgcgctcatgcacagcttcggcatcttcctgcaggggctgctcggcgtcgtggccttcagcacgttaatggtcaaacgcttcagagaaccaaagcatgaaagacgtccgtggaggatatggtttttagacacttccaaacaagccataggaatgctgttcatccactttgcaaatgtatacctagcagatctcagtgaagaggacccttgttcactgtacctcatcaacttcctcctggacgccactgtgggcatgctgctcatctacgtgggggtgcgcgccgtcagcgtcctggtagagtggcagcagtgggagtccctgcgcttcggcgaatatggagaccctctgcagtgtggagcctgggtcgggcagtgcgctctttacatcgtgatcatgatttttgaaaagtctgtcgtcttcatcgtcctcctcctactccagtggaaaaaggtggccctattgaatccaattgaaaaccccgacctgaagctggccatcgtcatgctgatcgtccccttctttgtcaacgctttgatgttttgggtagtggacaatttcctcatgagaaaggggaagacgaaagctaagctagaagaaaggggagccaaccaggactcgaggaatgggagcaaggtccgctaccggagggccgcatcccacgaggagtctgagtctgagatcctgatctcagcggatgatgagatggaggagtccgacgtggaggaggacctccgcagactgacccccctcaagcctgtgaagaaaaagaagcaccgctttgggctacccgtatgacacattcccatgctgggggtgacgggagggccccgccagccgctggtgtgcagaggtcatcccacagcatcgttccttaccctctctctgcccttcacccg

SEQ ID NO: 44 - protein, 323 aa, Homo sapiens
MAAGLAALRRQAARPGRALGPRAPPARPVMQGPAGNASRGLPGGPPSTVASGAGRCESGALMHSFGIFLQGLLGVVAFSTLMVKRFREPKHERRPWRIWFLDTSKQAIGMLFIHFANVYLADLSEEDPCSLYLINFLLDATVGMLLIYVGVRAVSVLVEWQQWESLRFGEYGDPLQCGAWVGQCALYIVIMIFEKSVVFIVLLLLQWKKVALLNPIENPDLKLAIVMLIVPFFVNALMFWVVDNFLMRKGKTKAKLEERGANQDSRNGSKVRYRRAASHEESESEILISADDEMEESDVEEDLRRLTPLKPVKKKKHRFGLPV

SEQ ID NO: 45 - DNA, 1728 bp, Homo sapiens
  CDS (1)..(1725)
atggatctggtgctaaaaagatgccttcttcatttggctgtgataggtgctttgctggctgtgggggctacaaaagggagccaggtgtggggaggacagccagtgtatccccaggaaactgacgatgcctgcatcttccctgatggtggaccttgcccatctggctcttggtctcagaagagaagctttgtttatgtctggaagacctggggccaatactggcaagttctagggggcccagtgtctgggctgagcattgggacaggcagggcaatgctgggcacacacaccatggaagtgactgtctaccatcgccggggatcccggagctatgtgcctcttgctcattccagctcagccttcaccattactgaccaggtgcctttctccgtgagcgtgtcccagttgcgggccttggatggagggaacaagcacttcctgagaaatcagcctctgacctttgccctccagctccatgaccccagtggctatctggctgaagctgacctctcctacacctgggactttggagacagtagtggaaccctgatctctcgggcacttgtggtcactcatacttacctggagcctggcccagtcactgcccaggtggtcctgcaggctgccattcctctcacctcctgtggctcctccccagttccaggcaccacagatgggcacaggccaactgcagaggcccctaacaccacagctggccaagtgcctactacagaagttgtgggtactacacctggtcaggcgccaactgcagagccctctggaaccacatctgtgcaggtgccaaccactgaagtcataagcactgcacctgtgcagatgccaactgcagagagcacaggtatgacacctgagaaggtgccagtttcagaggtcatgggtaccacactggcagagatgtcaactccagaggctacaggtatgacacctgcagaggtatcaattgtggtgctttctggaaccacagctgcacaggtaacaactacagagtgggtggagaccacagctagagagctacctatccctgagcctgaaggtccagatgccagctcaatcatgtctacggaaagtattacaggttccctgggccccctgctggatggtacagccaccttaaggctggtgaagagacaagtccccctggattgtgttctgtatcgatatggttccttttccgtcaccctggacattgtccagggtattgaaagtgccgagatcctgcaggctgtgccgtccggtgagggggatgcatttgagctgactgtgtcctgccaaggcgggctgcccaaggaagcctgcatggagatctcatcgccagggtgccagccccctgcccagcggctgtgccagcctgtgctacccagcccagcctgccagctggttctgcaccagatactgaagggtggctcggggacatactgcctcaatgtgtctctggctgataccaacagcctggcagtggtcagcacccagcttatcatgcctggtcaagaagcaggccttgggcaggttccgctgatcgtgggcatcttgctggtgttgatggctgtggtccttgcatctctgatatataggcgcagacttatgaagcaagacttctccgtaccccagttgccacatagcagcagtcactggctgcgtctaccccgcatcttctgctcttgtcccattggtgagaatagccccctcctcagtgggcagcaggtctga

SEQ ID NO: 46 - protein, 575 aa, Homo sapiens
MDLVLKRCLLHLAVIGALLAVGATKGSQVWGGQPVYPQETDDACIFPDGGPCPSGSWSQKRSFVYVWKTWGQYWQVLGGPVSGLSIGTGRAMLGTHTMEVTVYHRRGSRSYVPLAHSSSAFTITDQVPFSVSVSQLRALDGGNKHFLRNQPLTFALQLHDPSGYLAEADLSYTWDFGDSSGTLISRALVVTHTYLEPGPVTAQVVLQAAIPLTSCGSSPVPGTTDGHRPTAEAPNTTAGQVPTTEVVGTTPGQAPTAEPSGTTSVQVPTTEVISTAPVQMPTAESTGMTPEKVPVSEVMGTTLAEMSTPEATGMTPAEVSIVVLSGTTAAQVTTTEWVETTARELPIPEPEGPDASSIMSTESITGSLGPLLDGTATLRLVKRQVPLDCVLYRYGSFSVTLDIVQGIESAEILQAVPSGEGDAFELTVSCQGGLPKEACMEISSPGCQPPAQRLCQPVLPSPACQLVLHQILKGGSGTYCLNVSLADTNSLAVVSTQLIMPGQEAGLGQVPLIVGILLVLMAVVLASLIYRRRLMKQDFSVPQLPHSSSHWLRLPRIFCSCPIGENSPLLSGQQV

SEQ ID NO: 47 - DNA, 1733 bp, Homo sapiens
  CDS (145)..(1518)
ctcgagctgcagagctagctctgcagctcgctgcagagctcagctgcgtccggcggaggcagctgctgacccagctgtggactgtgccgggggcgggggacggaggggcaggagccctgggctccccgtggcgggggctgtatcatggaccacctcggggcgtccctctggccccaggtcggctccctttgtctcctgctcgctggggccgcctgggcgcccccgcctaacctcccggaccccaagttcgagagcaaagcggccttgctggcggcccgggggcccgaagagcttctgtgcttcaccgagcggttggaggacttggtgtgtttctgggaggaagcggcgagcgctggggtgggcccgggcaactacagcttctcctaccagctcgaggatgagccatggaagctgtgtcgcctgcaccaggctcccacggctcgtggtgcggtgcgcttctggtgttcgctgcctacagccgacacgtcgagcttcgtgcccctagagttgcgcgtcacagcagcctccggcgctccgcgatatcaccgtgtcatccacatcaatgaagtagtgctcctagacgcccccgtggggctggtggcgcggttggctgacgagagcggccacgtagtgttgcgctggctcccgccgcctgagacacccatgacgtctcacatccgctacgaggtggacgtctcggccggcaacggcgcagggagcgtacagagggtggagatcctggagggccgcaccgagtgtgtgctgagcaacctgcggggccggacgcgctacaccttcgccgtccgcgcgcgtatggctgagccgagcttcggcggcttctggagcgcctggtcggagcctgtgtcgctgctgacgcctagcgacctggaccccctcatcctgacgctctccctcatcctcgtggtcatcctggtgctgctgaccgtgctcgcgctgctctcccaccgccgggctctgaagcagaagatctggcctggcatcccgagcccagagagcgagtttgaaggcctcttcaccacccacaagggtaacttccagctgtggctgtaccagaatgatggctgcctgtggtggagcgcctgcacccccttcacggaggacccacctgctttcctggaagtcctctcagagcgctgctgggggacgatgcaggcagtggagccggggacagatgatgagggccccctgctggagccagtgggcagtgagcatgcccaggatacctatctggtgctggacaaatggttgctgccccggaacccgcccagtgaggacctcccagggccatgggcactgtgccctgagctgccccctaccccaccccacctaaagtacctgtaccttgtggtatctgactctggcatctcaactgactacagctcaggggactcccagggagcccaagggggcttatccgatggcccctactccagcccttatgagaacagccctatcccagccgctgagcctctgccccccagctatgtggcttgctcttaggacaccaggctgcagatgatcagggatccaatatgactcagagaaccagtgcagactcaagacttatggaacagggatggcgaggcctctctcaggagcaggggcattgctgattttgtctgcccaatccatcctgctcaggaaaccacaaccttgcagtatttttaaatatgtatagtttttttgctgcagagctagctctgcagctcgag

SEQ ID NO: 48 - protein, 458 aa, Homo sapiens
MDHLGASLWPQVGSLCLLLAGAAWAPPPNLPDPKFESKAALLAARGPEELLCFTERLEDLVCFWEEAASAGVGPGNYSFSYQLEDEPWKLCRLHQAPTARGAVRFWCSLPTADTSSFVPLELRVTAASGAPRYHRVIHINEVVLLDAPVGLVARLADESGHVVLRWLPPPETPMTSHIRYEVDVSAGNGAGSVQRVEILEGRTECVLSNLRGRTRYTFAVRARMAEPSFGGFWSAWSEPVSLLTPSDLDPLILTLSLILVVILVLLTVLALLSHRRALKQKIWPGIPSPESEFEGLFTTHKGNFQLWLYQNDGCLWWSACTPFTEDPPAFLEVLSERCWGTMQAVEPGTDDEGPLLEPVGSEHAQDTYLVLDKWLLPRNPPSEDLPGPWALCPELPPTPPHLKYLYLVVSDSGISTDYSSGDSQGAQGGLSDGPYSSPYENSPIPAAEPLPPSYVACS

SEQ ID NO: 49 - DNA, 1733 bp, Homo sapiens; identical to SEQ ID NO: 47
  CDS (145)..(1518)

SEQ ID NO: 50 - protein, 458 aa, Homo sapiens; identical to SEQ ID NO: 48

SEQ ID NO: 51 - DNA, 1435 bp, Homo sapiens
  CDS (12)..(1385)
ggggctgtatcatggaccacctcggggcgtccctctggccccaggtcggctccctttgtctcctgctcgctggggccgcctgggcgcccccgcctaacctcccggaccccaagttcgagagcaaagcggccttgctggcggcccgggggcccgaagagcttctgtgcttcaccgagcggttgggggacttggtgtgtttctgggaggaagcggcgagcgctggggtgggcccgggcaactacagcttctcctaccagctcgaggatgagccatggaagctgtgtcgcctgcaccaggctcccacggctcgtggtgcggtgcgcttctggtgctcgctgcctacagccgacacgtcgagcttcgtgcccctagagttgcgcgtcacagcagcctccggcgctccgcgatatcaccgtgtcatccacatcaatgaagtagtgcttctagacgcccccgtggggctggtggcgcggttggctgacgagagcggccacgtagtgttgcgctggctcccgccgcctgagacacccatgacgtcccacatccgctacgaggtggacgtctcggccggcaacggcgcagggagcgtacagagggtggagatcctggagggccgcaccgagtgtgtgctgagcaacctgcggggccggacgcgctacaccttcgccgtccgcacgcgtatggctgagccgagcttcggcggcttctggagcgcctggtcggagcctgtgtcgctgctgacgcctagcgacctggaccccctcatcctgacgctctccctcatcctcgtggtcatcctggtgctgctgaccgtgctcgcgctgctctcccaccgccgggctctgaagcagaagatctggcctggcatcccgagcccagagagcgagtttgaaggcctcttcaccacccacaagggtaacttccagctgtggctgtaccagaatgatggctgcctgtggtggagcccctgcacccccttcacggaggacccacctgcttccctggaagtcctctcagagcgctgctgggggacgatgcaggcagtggagccggggacagatgatgagggccccctgctggagccagtgggcagtgagcatgcccaggatacctatctggtgctggacaaatggttgctgccccggaacccgcccagtgaggacctcccagggccatgggcactgtgccctgagctgccccctaccccaccccacctaaagtacctgtaccttgtggtatctgactctggcatctcaactgactacagctcaggggactcccagggagcccaagggggcttatccgatggcccctactccagcccttatgagaacagccctatcccagccgctgagcctctgccccccagctatgtggcttgctcttaggacaccaggctgcagatgatcagggatccaatatgactcagagaacc

SEQ ID NO: 52 - protein, 458 aa, Homo sapiens
MDHLGASLWPQVGSLCLLLAGAAWAPPPNLPDPKFESKAALLAARGPEELLCFTERLGDLVCFWEEAASAGVGPGNYSFSYQLEDEPWKLCRLHQAPTARGAVRFWCSLPTADTSSFVPLELRVTAASGAPRYHRVIHINEVVLLDAPVGLVARLADESGHVVLRWLPPPETPMTSHIRYEVDVSAGNGAGSVQRVEILEGRTECVLSNLRGRTRYTFAVRTRMAEPSFGGFWSAWSEPVSLLTPSDLDPLILTLSLILVVILVLLTVLALLSHRRALKQKIWPGIPSPESEFEGLFTTHKGNFQLWLYQNDGCLWWSPCTPFTEDPPASLEVLSERCWGTMQAVEPGTDDEGPLLEPVGSEHAQDTYLVLDKWLLPRNPPSEDLPGPWALCPELPPTPPHLKYLYLVVSDSGISTDYSSGDSQGAQGGLSDGPYSSPYENSPIPAAEPLPPSYVACS

SEQ ID NO: 53 - DNA, 1585 bp, Homo sapiens
  CDS (12)..(1535)
ggggctgtatcatggaccacctcggggcgtccctctggccccaggtcggctccctttgtctcctgcccgctggggccgcctgggcgcccccgcctaacctcccggaccccaagttcgagagcaaagcggccttgctggcggcccgggggcccgaagagcttctgtgcttcaccgagcggttggaggacttggtgtgtttctgggaggaagcggcgagcgctggggtgggcccgggcaactacagcttctcctaccagctcgaggatgagccatggaagctgtgtcgcctgcaccaggctcccacggctcgtggtgcggtgcgcttctggtgttcgctgcctacagccgacacgtcgagcttcgtgcccctagagttgcgcgtcacagcagcctccggcgctccgcgatatcaccgtgtcatccacatcaatgaagtagtgctcctagacgcccccgtggggctggtggcgcggttggctgacgagagcggccacgtagtgttgcgctggctcccgccgcctgagacacccatgacgtctcacatccgctacgcggtggacgtctcggccggcaacggcgcagggagcgtacagagggtgaagatcctggagggccgcaccgagtgtgtgctgagcaacctgcggggccggacgcgctacaccttcgccgtccgcgcgcgtatggctgagccgagcttcggcggcttctggagcgcctggtcggagcctgtgtcgctgctgacgcctagcgacctggaccccctcatcctgacgctctccctcatcctcgtggtcatcctggtgctgctgaccgtgctcgcgctgctctcccaccgccgggctctgaagcagaagatctggcctggcatcccgagcccagagagcgagtttgaaggcctcttcaccacccacaagggtaacttccagctgtggctgtaccagaatgatggctgcctgtggtggagcccctgcacccccttcacggaggacccacctgcttccctggaagtcctctcagagcgctgctgggggacgatgcaggcagtggagccggggacagatgatgagggccccctgctggagccagtgggcagtgagcatgcccaggatacctatctggtgctggacaaatggttgctgccccggaacccgcccagtgaggacctcccagggcctggtggcagtgtggacatagtggccatggatgaaggctcagaagcatcctcctgctcatctgctttggcctcgaagcccagcccagagggagcctctgctgccagctttgagtacactatcctggaccccagcccccagctcttgcgtccatggacactgtgccctgagctgccccctaccccaccccacctaaagtacctgtaccttgtggtatctgactctggcatctcaactgactacagctcaggggactcccagggagcccaagggggcttatccgatggcccctactccaacccttatgagaacagccttatcccagccgctgagcctctgccccccagctatgtggcttgctcttaggacaccaggctgcagatgatcagggatccaatatgactcagagaacc

SEQ ID NO: 54 - protein, 508 aa, Homo sapiens
MDHLGASLWPQVGSLCLLPAGAAWAPPPNLPDPKFESKAALLAARGPEELLCFTERLEDLVCFWEEAASAGVGPGNYSFSYQLEDEPWKLCRLHQAPTARGAVRFWCSLPTADTSSFVPLELRVTAASGAPRYHRVIHINEVVLLDAPVGLVARLADESGHVVLRWLPPPETPMTSHIRYAVDVSAGNGAGSVQRVKILEGRTECVLSNLRGRTRYTFAVRARMAEPSFGGFWSAWSEPVSLLTPSDLDPLILTLSLILVVILVLLTVLALLSHRRALKQKIWPGIPSPESEFEGLFTTHKGNFQLWLYQNDGCLWWSPCTPFTEDPPASLEVLSERCWGTMQAVEPGTDDEGPLLEPVGSEHAQDTYLVLDKWLLPRNPPSEDLPGPGGSVDIVAMDEGSEASSCSSALASKPSPEGASAASFEYTILDPSPQLLRPWTLCPELPPTPPHLKYLYLVVSDSGISTDYSSGDSQGAQGGLSDGPYSNPYENSLIPAAEPLPPSYVACS

SEQ ID NO: 55 - DNA, 751 bp, Homo sapiens
  CDS (17)..(697)
cgcggcagctcccaccatggcggagaccaagctccagctgtttgtcaaggcgagtgaggacggggagagcgtgggtcactgcccctcctgccagcggctcttcatggtcctgctcctcaagggcgtacctttcaccctcaccacggtggacacgcgcaggtccccggacgtgctgaaggacttcgcccccggctcgcagctgcccatcctgctctatgacagcgacgccaagacagacacgctgcagatcgaggactttctggaggagacgctggggccgcccgaggagtccaacaccgccggcaacgacgttttccacaagttctccgcgttcatcaagaacccggtgcccgcgcaggacgaagccctgtaccagcagctgctgcgcgccctcgccaggctggacagctacctgcgcgcgcccctggagcacgagctggcgggggagccgcagctgcgcgagtcccgccgccgcttcctggacggcgacaggctcacgctggccgactgcagcctcctgcccaagctgcacatcgtcgacacggtgtgcgcgcacttccgccaggcgcccatccccgcggagtgcgcggcgtacgccgttacctggacagcgcgatgcaggagaaagagttcaaatacacgtgtccgcacagcgccgagatcctggcggcctaccggcccgccgtgcaccccacgctagcgccccaccccgcgtctgtcgcccaataaaggcatctttgtcgggaaaaaa

SEQ ID NO: 56 - protein, 227 aa, Homo sapiens
MAETKLQLFVKASEDGESVGHCPSCQRLFMVLLLKGVPFTLTTVDTRRSPDVLKDFAPGSQLPILLYDSDAKTDTLQIEDFLEETLGPPEESNTAGNDVFHKFSAFIKNPVPAQDEALYQQLLRALARLDSYLRAPLEHELAGEPQLRESRRRFLDGDRLTLADCSLLPKLHIVDTVCAHFRQAPIPAECAAYAVTWTARCRRKSSNTRVRTAPRSWRPTGPPCTPR

SEQ ID NO: 57 - DNA, 693 bp, Homo sapiens
  CDS (7)..(687)
cccaccatggcggagaccaagctccagctgtttgtcaaggcgagtgaggacggggagagcgtgggtcactgcccctcctgccagcggctcttcatggtcctgctcctcaagggcgtacctttcaccctcaccacggtggacacgcgcaggtccccggacgtgctgaaggacttcgcccccggctcgcagctgcccatcctgctctatgacagcgacgccaagacagacacgctgcagatcgaggactttctggaggagacgctggggccgcccgaggagtccaacaccgccggcaacgacgttttccacaagttctccgcgttcatcaagaacccggtgcccgcgcaggacgaagccctgtaccagcagctgctgcgcgccctcgccaggctggacagctacctgcgcgcgcccctggagcacgagctggcgggggagccgcagctgcgcgagtcccgccgccgcttcctggacggcgacaggctcacgctggccgactgcagcctcctgcccaagctgcacatcgtcgacacggtgtgcgcgcacttccgccaggcgcccatccccgcggagctgcgcggcgtacgccgctacctggacagcgcgatgcaggagaaagagttcaaatacacgtgtccgcacagcgccgagatcctggcggcctaccggcccgccgtgcacccccgctagcgc

SEQ ID NO: 58 - protein, 227 aa, Homo sapiens
MAETKLQLFVKASEDGESVGHCPSCQRLFMVLLLKGVPFTLTTVDTRRSPDVLKDFAPGSQLPILLYDSDAKTDTLQIEDFLEETLGPPEESNTAGNDVFHKFSAFIKNPVPAQDEALYQQLLRALARLDSYLRAPLEHELAGEPQLRESRRRFLDGDRLTLADCSLLPKLHIVDTVCAHFRQAPIPAELRGVRRYLDSAMQEKEFKYTCPHSAEILAAYRPAVHPR

SEQ ID NO: 59 - DNA, 784 bp, Homo sapiens
  CDS (29)..(709)
cggccgcgtcgacgcggcagctcccaccatggcggagaccaagctccagctgtttgtcaaggcgagtgaggacggggagagcgtgggtcactgcccctcctgccagcggctcttcatggtcctgctcctcaagggcgtacctttcaccctcaccacggtggacacgcgcaggtccccggacgtgctgaaggacttcgcccccggctcgcagctgcccatcctgctctatgacagcgacgccaagacagacacgctgcagatcgaggactttctggaggagacgctggggccgcccgaggagtccaacaccgccggcaacgacgttttccacaagttctccgcgttcatcaagaacccggtgcccgcgcaggacgaagccctgtaccagcagctgctgcgcgccctcgccaggctggacagctacctgcgcgcgcccctggagcacgagctggcgggggagccgcagctgcgcgagtcccgccgccgcttcctggacggcgacaggctcacgctggccgactgcagcctcctgcccaagctgcacatcgtcgacacggtgtgcgcgcacttccgccaggcgcccatccccgcggagctgcgcggcgtacgccgctacctggacagcgcgatgcaggagaaagagttcaaatacacgtgtccgcacagcgccgagatcctggcggcctaccggcccgccgtgcacccccgctagcgccccaccccgcgtctgtcgcccaataaaggcatctttgtcgggaaaaaaaaaaaaaaaaaattaaaaaaa

SEQ ID NO: 60 - protein, 227 aa, Homo sapiens; identical to SEQ ID NO: 58

SEQ ID NO: 61 - DNA, 751 bp, Homo sapiens; identical to SEQ ID NO: 55
  CDS (17)..(697)

SEQ ID NO: 62 - protein, 227 aa, Homo sapiens; identical to SEQ ID NO: 56

SEQ ID NO: 63 - DNA, 751 bp, Homo sapiens; identical to SEQ ID NO: 55
  CDS (17)..(697)

SEQ ID NO: 64 - protein, 227 aa, Homo sapiens; identical to SEQ ID NO: 56

SEQ ID NO: 65 - DNA, 2400 bp, Homo sapiens
  CDS (77)..(925)
gtgcgcgttggggcggccggccaatgccggaccgcttcggcaccgcccgcccgatccctccacccgtgggccggcaatggcgggcgcagtttcgctcttgggtgtggtggggctgctgcttgtgtctgcgctgtccggggtcctaggagaccgcgccaatcccgacctccgggcacacccagggaacgcagcccaccccggctctggagccacggaaccccggcggcgaccaccgctcaaggatcaacgcgagcggacccgggccgggtcgctgcctctgggggcgctgtacaccgcggccgtcgcggcttttgtgctgtacaagtgtttgcaggggaaagatgaaactgcggttctccacgaggaggcaagcaagcagcagccactgcagtcagagcaacagctggcccagttgacacaacagctggcccagacagagcagcacctgaacaacctgatggcccagctggaccccctttttgagcgtgtgactactctggctggagcccagcaggagcttctgaacatgaagctatggaccatccacgagctgctgcaagatagcaagccggacaaggatatggaggcttcagaaccaggtgaaggctcgggaggcgagtctgctggaggtggagacaaagtctctgaaactggaacattcctgatctctccccacacagaggccagcagacctcttcctgaggacttctgtttaaaggaggacgaggaggaggttggtgacagtcaggcctgggaggagcccacaaactggagcacagagacatggaacctagctacttcctgggaggtggggcggggactacggagaaggtgcagccaggctgtggcaaagggccccagtcacagccttggctgggaaggagggacgacagctgaaggtcgactaaaacaaagtctgttttcatgatggagtgctcctgtgtgttttttcgatcctagttggttgtacacacccatactaggtgcctaaggacaactgggccttcttgaagagctgtccttattaggacaaaaagaggctgccttccagtgtgacagcagagaagatagagggagctccagctcttttcctcgtattcctgaggccaccagcatgcccgcgttcagggcccaaaaatcccttttctcatagcaaaactgagacagaagggtctttcccaaaaaaaagaaaaaaaaactttactcaaatccagtggaaaaataaatgatagaaactatacacaacataaaaatagccacatttacaaagctgcagccttgataaatgacgggccatggacacagcacagagcttatcagtcccaaatcccctcatctgtgttaggggctggttcatttgaggtttagttgggttggacttggtttcctgattcttcttttttaataaaatttcttaattattttttcttaaatagagacagggtctcactcactgtgttgcccaggctggtcttgaactcctgggctggaatgatcctgccacctctgcttcccaaagtgctgggattacaggcatgagccactgtgcctggccgtgatttttaagagttggtcagatgatctggagtagcttggtccaggcaaacagaaagtgacctttgtcaaatcatgaagggttctgttttgttcagtactgaagattcctttgtactcttggctgtgacctatccctgaggtatcctgagttctggaatctataagattcctctagtttttctggctgctgatagcccaagtcagactgtggtaccagcgtgacagctcctcctggtctgtggacataagcagtagcttctcatgagggaaggacaggtgtgagctgttgatggtcagggctgttgggacctgtgttttcagccaaagctacgacgagattctcatactgctggagccgttgcagaggcagagggagcaggtcctggagctgaaggcccccaaacccagggcggccttcctgaagccgtacaaacctccggaaacctttatttttctttagctgctcctgcagggtggtctgggacctctctgagttggcagcaaattggttatagagctccaagtggcggcagaagccctccagcccttggccccagcatcctccttccaggtagggaagcagctcctggctggcgccgtagatgagctcccaggagccaaacagggcctggcgctcaggtggtcgcagggtccccttggctttcaggatccccaaaaagtacgtggccaccagccccagctgttcttggtagcgccgctcggtctctagcagctcccgggcggtgcaggcgcgtttccgctcccagcgggcacgctgctcttgcaccgggcaccgcgaaccggggcaggagagctccatgccctggctgagggatcgacact

SEQ ID NO: 66 - protein, 283 aa, Homo sapiens
MAGAVSLLGVVGLLLVSALSGVLGDRANPDLRAHPGNAAHPGSGATEPRRRPPLKDQRERTRAGSLPLGALYTAAVAAFVLYKCLQGKDETAVLHEEASKQQPLQSEQQLAQLTQQLAQTEQHLNNLMAQLDPLFERVTTLAGAQQELLNMKLWTIHELLQDSKPDKDMEASEPGEGSGGESAGGGDKVSETGTFLISPHTEASRPLPEDFCLKEDEEEVGDSQAWEEPTNWSTETWNLATSWEVGRGLRRRCSQAVAKGPSHSLGWEGGTTAEGRLKQSLFS

SEQ ID NO: 67 - DNA, 1449 bp, Homo sapiens
  CDS (148)..(1149)
ggtgagaaagttggtggcgtgagattaaaaaaaccgttttcgggcataactttctaagactataggctttcagaggcattgtggctagcagaatagctaatagacacgaaatgaacaaatacaggaaagctagaatgacactatcttatgcaaatatggtctggccccgccctacggggagtgggcgtggcctccccggagccggccggcctgctcgcgtgcgcgtgcgcgttggggcggccggccaatgccggaccgcttcggcaccgcccgcccgatccctccacccgtgggccggcaatggcgggcgcagtttcgctcttgggtgtggtggggctgctgcttgtgtctgcgctgtccggggtcctaggagaccgcgccaatcccgacctccgggcacacccaggtaacgcagcccaccccggctctggagccacggaaccccggcggcgaccaccgctcaaggatcaacgcgagcggacccgggccgggtcgctgcctctgggggcgctgtacaccgcggccgtcgcggcttttgtgctgtacaagtgtttgcaggggaaagatgaaactgcggttctccacgaggaggcaagcaagcagcagccactgcagtcagagcaacagctggcccagttgacacaacagctggcccagacagagcagcacctgaacaacctgatggcccagctggaccccctttttgagcgggtgactactctggctggagcccagcaggagcttctgaacatgaagctatggaccatccacgagctgctgcaagatagcaagccggacaaggatatggaggcttcagaaccaggtgaaggctcgggaggcgagtctgctggaggtggagacaaagtctctgaaactggaacattcctgatctctccccacacagaggccagcagacctcttcctgaggacttctgtttaaaggaggacgaggaggagattggtgacagtcaggcctgggaggagcccacaaactggagcacagagacatggaacctagctacttcctgggaggtggggcggggactacggagaaggtgcagccaggctgtggcaaagggccccagtcacagccttggctgggaaggagggacgacagctgaaggtcgactaaaacaaagtctgttttcatgatggagtgctcctgtgtgttttttcgatcctagttggttgtacacacccatactaggtgcctaaggacaactgggccttcttgaagagctgtccttattaggacaaaaagaggctgccttccagtgtgacagcagagaagatagagggagctccagctcttttcctcgtattcctgaggccaccagcatgcccgcgttcagggcccaaaaatcccttttctcatagcaaaactgagacagaagggtctttcccaaaaaaaagaaaaaaaactttactcaaatccagtggaaaaataaa

SEQ ID NO: 68 - protein, 334 aa, Homo sapiens [sequence omitted]

SEQ ID NO: 69 - DNA, 539 bp, Homo sapiens
  CDS (61)..(525)
ccggccaatgccggaccgcttcggcaccgcccgcccgatccctccacccgtgggccggcaatggcgggcgcagtttcgctcttgggtgtggtggggctgctgcttgtgtctgcgctgtccggggtcctaggagaccgcgccaatcccgacctccgggcacacccagggaacgcagcccaccccggctctggagccacggaaccccggcggcgaccaccgctcaaggatcaacgcgagcggacccgggccgggtcgctgcctctgggggcgctgtacaccgcggccgtcgcggcttttgtgctgtacaagtgtttgcaggggaaagatgaaactgcggttctccacgaggaggcaagcaagcagcagccactgcagtcagagcaacagctggcccagttgacacaacagctggcccagacagagcagcacctgaacaacctgatggcccagctggaccccctttttgagcgcccagcaggagcttctgaacatgaagctatggaccatccacgagctgctgcaagatagcaagcccggac

SEQ ID NO: 70 - protein, 155 aa, Homo sapiens
MAGAVSLLGVVGLLLVSALSGVLGDRANPDLRAHPGNAAHPGSGATEPRRRPPLKDQRERTRAGSLPLGALYTAAVAAFVLYKCLQGKDETAVLHEEASKQQPLQSEQQLAQLTQQLAQTEQHLNNLMAQLDPLFERPAGASEHEAMDHPRAAAR

SEQ ID NO: 71 - DNA, 774 bp, Homo sapiens
  CDS (77)..(487)
gtgcgcgttggggcggccggccaatgccggaccgcttcggcaccgcccgcccgatccctccacccgtgggccggcaatggcgggcgcagtttcgctcttgggtgtggtggggctgctgcttgtgtctgcgctgtccggggtcctaggagaccgcgccaatcccgacctccgggcacacccagggaacgcagcccaccccggctctggagccacggaaccccggcggcgaccaccgctcaaggatcaacgcgagcggacccgggccgggtcgctgcctctgggggcgctgtacaccgcggccgtcgcggcttttgtgctgtacaagtgtttgcaggggaaagatgaaactgcggttctccacgaggaggcaagcaagcagcagccactgcagtcagagcaacagctggcccagttgacacaacagctggcccagacagagcagcacctgaacaacctgatggcccagctggaccccctttttgagcggtgaggagagcaatgattctgtgaatttttggggaatttgtggcaggagggaggaatggggacataggttgggagccactgagtggacatttcttcagtgtgactactctggctggagcccagcaggagcttctgaacatgaagctatggaccatccacgagctgctgcaagatagcaagccggacaaggatatggaggcttcagaaccaggtgaaggctcgggaggcgagtctgctggaggtggagacaaagtctctgaaactggaacattcctgatctctccccca

SEQ ID NO: 72 - protein, 137 aa, Homo sapiens
MAGAVSLLGVVGLLLVSALSGVLGDRANPDLRAHPGNAAHPGSGATEPRRRPPLKDQRERTRAGSLPLGALYTAAVAAFVLYKCLQGKDETAVLHEEASKQQPLQSEQQLAQLTQQLAQTEQHLNNLMAQLDPLFER

SEQ ID NO: 73 - DNA, 2463 bp, Homo sapiens
  CDS (100)..(1890)
aactctcctattcatggaggcgaacactgaggatgctttccacatgaaccctgaagtgaacttctgatacatttcctgcagcaagagaaggcagccaacatgaaggaaaatgtggcatctgcaaccgttttcactctgctactttttctcaacacctgccttctgaatggacagttacctcctggaaaacctgagatctttaaatgtcgttctcccaataaggaaacattcacctgctggtggaggcctgggacagatggaggacttcctaccaactcctgccactttggcaagcagtacacctccatgtggaggacatacatcatgatggtcaatgccactaaccagatgggaagcagtttctcggatgaactttatgtggacgtgacttacatagttcagccagaccctcctttggagctggctgtggaagtaaaacagccagaagacagaaaaccctacctgtggattaaatggtctccacctaccctgattgacttaaaaactggttggttcacgctcctgtatgaaattcgattaaaacccgagaaagcagctgagtgggagatccattttgctgggcagcaaacagagtttaagattctcagcctacatccaggacagaaataccttgtccaggttcgctgcaaaccagaccatggatactggagtgcatggagtccagcgaccttcattcagatacctagtgacttcaccatgaatgatacaaccgtgtggatctctgtggctgtcctttctgctgtcatctgtttgattattgtctgggcagtggctttgaagggctatagcatggtgacctgcatctttccgccagttcctgggccaaaaataaaaggatttgatgctcatctgttggagaagggcaagtctgaagaactactgagtgccttgggatgccaagactttcctcccacttctgactatgaggacttgctggtggagtatttagaagtagatgatagtgaggaccagcatctaatgtcagtccattcaaaagaacacccaagtcaaggtatgaaacccacatacctggatcctgacactgactcaggccgggggagctgtgacagcccttcccttttgtctgaaaagtgtgaggaaccccaggccaatccctccacattctatgatcctgaggtcattgagaagccagagaatcctgaaacaacccacacctgggacccccagtgcataagcatggaaggcaaaatcccctattttcatgctggtggatccaaatgttcaacatggcccttaccacagcccagccagcacaaccccagatcctcttaccacaatattactgatgtgtgtgagctggctgtgggccctgcaggtgcaccggccactctgttgaatgaagcaggtaaagatgctttaaaatcctctcaaaccattaagtctagagaagagggaaaggcaacccagcagagggaggtagaaagcttccattctgagactgaccaggatacgccctggctgctgccccaggagaaaaccccctttggctccgctaaacccttggattatgtggagattcacaaggtcaacaaagatggtgcattatcattgctaccaaaacagagagagaacagcggcaagcccaagaagcccgggactcctgagaacaataaggagtatgccaaggtgtccggggtcatggataacaacatcctggtgttggtgccagatccacatgctaaaaacgtggcttgctttgaagaatcagccaaagaggccccaccatcacttgaacagaatcaagctgagaaagccctggccaacttcactgcaacatcaagcaagtgcaggctccagctgggtggtttggattacctggatcccgcatgttttacacactcctttcactgatagcttgactaatggaatgattggttaaaatgtgatttttcttcaggtaacactacagagtacgtgaaatgctcaagaatgtagtcagactgacactactaaagctcccagctcctttcatgctccatttttaaccacttgcctctttctccagcagctgattccagaacaaatcattatgtttcctaactgtgatttgtagatttactttttgctgttagttataaaactatgtgttcaatgaaataaaagcacactgcttagtattcttgagggacaatgccaataggtatatcctctggaaaaggctttcatgatttggcatgggacagacggaaatgaaattgtcaaaattgtttaccatagaaagatgacaaaagaaaattttccacataggaaaatgccatgaaaattgcttttgaaaaacaactgcataacctttacactcctcgtccattttattaggattacccaaatataaccatttaaagaaagaatgcattccagaacaaattgtttacataagttcctataccttactgacacattgctgatatgcaagtaagaaat

SEQ ID NO: 74 - protein, 597 aa, Homo sapiens
MKENVASATVFTLLLFLNTCLLNGQLPPGKPEIFKCRSPNKETFTCWWRPGTDGGLPTNSCHFGKQYTSMWRTYIMMVNATNQMGSSFSDELYVDVTYIVQPDPPLELAVEVKQPEDRKPYLWIKWSPPTLIDLKTGWFTLLYEIRLKPEKAAEWEIHFAGQQTEFKILSLHPGQKYLVQVRCKPDHGYWSAWSPATFIQIPSDFTMNDTTVWISVAVLSAVICLIIVWAVALKGYSMVTCIFPPVPGPKIKGFDAHLLEKGKSEELLSALGCQDFPPTSDYEDLLVEYLEVDDSEDQHLMSVHSKEHPSQGMKPTYLDPDTDSGRGSCDSPSLLSEKCEEPQANPSTFYDPEVIEKPENPETTHTWDPQCISMEGKIPYFHAGGSKCSTWPLPQPSQHNPRSSYHNITDVCELAVGPAGAPATLLNEAGKDALKSSQTIKSREEGKATQQREVESFHSETDQDTPWLLPQEKTPFGSAKPLDYVEIHKVNKDGALSLLPKQRENSGKPKKPGTPENNKEYAKVSGVMDNNILVLVPDPHAKNVACFEESAKEAPPSLEQNQAEKALANFTATSSKCRLQLGGLDYLDPACFTHSFH

SEQ ID NO: 75 - DNA, 2221 bp, Homo sapiens
  CDS (25)..(711)
agcgggccgggcggcggcggggagatgcggctgctggcactggcggcggccgcgctgctggcgcgggctccggctccggaggtctgtgcggccctcaatgtcactgtgtccccggggcccgtggttgactacctggagggggagaatgccactctcctctgccacgtctcccagaaaaggcggaaggacagcttgctggccgtgcgctggttctttgcacactccttcgactcccaggaggccttgatggtgaagatgaccaagctccgggtggtgcagtactatgggaatttcagccgcagcgccaaacggcggaggctgcgcctgctggaggagcagcggggggcgctctacaggctctccgtcttgacactgcagccctccgatcaagggcattacgtctgcagagtccaggaaatcagcaggcacaggaacaagtggacggcctggtccaatggctcctcagccacggaaatgagagtcatttccctcaaagcttctgaagagtcatcctttgagaaaacaaaagagacttgggcattttttgaagatctctatgtgtatgctgtcctcgtgtgctgcatggggatcctcagcattctgctcttcatgctggtcatcgtctggcagtctgtgtttaacaagcggaaatccagagtgagacattatttggtgaaatgccctcagaacagctcaggggagagctgtcactagcgtgaccagcttggccccactacagcccaagaagggcaagaggcagaaggagaagcctgacattcctcccgcagtccctgccaaagctccgatagcccccacgttccataaaccgaagctgctgaaaccacagagaaaagtcacgctgccaaagattgctgaggaaaacttaacctatgccgagctggagctgatcaaaccccaccgggctgccaaaggcgcccccaccagcactgtctacgcccagatcctcttcgaggagaacaagctgtagtacagcgtccacctccaggttctatttaatacctgccacccagtgatttatgaagccttggagacaaagcccttatgtctgtattttcactcatgccttctgagtggtggggagccccttttcagcagcattctgggtgcctttgaagaggtacaagcctgctctccccaaaagaatcagggccacagctcttgacagatctcccgggacaagatgcgcctgggtttgagccctgagcgtaaggattctgatcctgagagcagccaaggagattttctgctgagccaaaccccttcacatttttctcctctttccccaggttttctttaaaatcgtttttaaatcttaattttactctctactcttcctgtatccacgatacaagctcacagtatatagctagaggaaatgccattatggacccaactgtaagatggcacatatgttggttttccaaggatcagatggcattgcagggccacagccaactgctgattgccagcaccacctgagatggcatctcttgttttaaatagatgcactaaccctgaagattaaggccagaggggcagactgactagagaagtataaggtctgtctctgaatgccatggtgcccacctatgagaccctgaggccgcagacaaagaagaacaccattctagagggcttccagccctttcacaaggtggacctgtactgatagagaaacacactctctaagaagtgcttactcacccttttccaaaggagcacaggtgttggccatcagaagacacactggagcgcatgggcctcttcactgtgtgccaagctcagtcacctctgattcagcccctgagggtgtctgctgccaggtgccctcagggtaggagagtgggaagtacacgccaagctggaaagtgtgttctgaagaccctcctcttgccaagtgccttgcccattgcaaccttgtgtgtgaattctaatgggtttgaatgggggtcagggtgcatggggaagttgctctgtggacctttgggacacaggaatcttggacttactggcaggggatccattctgaaagcaccatcctgtcaactgtgttattgaggacatttcttgatgtgagtatagtctgggtggctatttactgcccactatagaaattgtttgactatgtagtggaccatgtatatatgataaattatctattttaaacacaaaaaaaaaaaaaaaaaaaaagggcggccgc

SEQ ID NO: 76 - protein, 229 aa, Homo sapiens
MRLLALAAAALLARAPAPEVCAALNVTVSPGPVVDYLEGENATLLCHVSQKRRKDSLLAVRWFFAHSFDSQEALMVKMTKLRVVQYYGNFSRSAKRRRLRLLEEQRGALYRLSVLTLQPSDQGHYVCRVQEISRHRNKWTAWSNGSSATEMRVISLKASEESSFEKTKETWAFFEDLYVYAVLVCCMGILSILLFMLVIVWQSVFNKRKSRVRHYLVKCPQNSSGESCH

SEQ ID NO: 77 - DNA, 704 bp, Homo sapiens
  CDS (1)..(696)
atgggcgactggagctttctgggaagactcttagaaaatgcacaggagcactccacggtcatcggcaaggtttggctgaccgtgctgttcatcttccgcatcttggtgctgggggccgcggcggaggacgtgtggggcgatgagcagtcagacttcacctgcaacacccggccgcccgccgttgccatcgggttcccaccctactatgcgcacaccgctgcgcccctgggacaggcccgcgccgtgggctaccccggggccccgccaccagccgcggacttcaaaatgctagccctgaccgaggcgcgcggaaagggccagtccgccaagctctacaacggccaccaccacctgctgatgactgagcagaactgggccaaccaggcggccgagcggcagcccccggcactcaaggcttacccggcagcgtccacgcctgcagcccccagccccgtcggcagcagctccccgccactcgcgcacgaggctgaggcgggcgcggcgcccctgctgctggatgggagcggcagcagtctggaggggagcgccctggcagggacccccgaggaggaggagcaggccgtgaccaccgcggcccagatgcaccagccgcccttgcccctcggagacccaggtcgggccagcaaggccagcagggccagcagcgggcgggccagaccggaggacttggccatctagtgccc

SEQ ID NO: 78 - protein, 232 aa, Homo sapiens
MGDWSFLGRLLENAQEHSTVIGKVWLTVLFIFRILVLGAAAEDVWGDEQSDFTCNTRPPAVAIGFPPYYAHTAAPLGQARAVGYPGAPPPAADFKMLALTEARGKGQSAKLYNGHHHLLMTEQNWANQAAERQPPALKAYPAASTPAAPSPVGSSSPPLAHEAEAGAAPLLLDGSGSSLEGSALAGTPEEEEQAVTTAAQMHQPPLPLGDPGRASKASRASSGRARPEDLAI

SEQ ID NO: 79 - DNA, 1308 bp, Homo sapiens
  CDS (1)..(1305)
atgggcgactggagctttctgggaagactcttagaaaatgcacaggagcactccacggtcatcggcaaggtttggctgaccgtgctgttcatcttccgcattttggtgctgggggccgcggccgaggacgtgtggggcgatgagcagtcagacttcacctgcaacacccagcagccgggctgcgagaacgtctgctacgacagggccttccccatctcccacatccgcttctgggcgctgcagatcatcttcgtgtccacgcccaccctcatctacctgggccacgtgctgcacatcgtgcgcatggaggagaagaagaaagagagggaggaggaggagcagctgaagagagagagccccagccccaaggagccaccgcaggacaatccctcgtcgcgggacgaccgcggcagggtgcgcatggccggcgcgctgctgcggacctacgtcttcaacatcatcttcaagacgctgttcgaggtgggcttcatcgccggccagtactttctgtacggcttcgagctgaagccgctctaccgctgcgaccgctggccctgccccaacacggtggactgcttcatctccaggcccacggagaagaccatcttcatcatcttcatgctggcggtggcctgcgcgtcactgctgctcaacatgctggagatataccacctgggctggaagaagctcaagcagggcgtgaccagccgcctcggcccggacgcctccgaggccccgctggggacagccgatcccccgcccctgccccccagctcccggccgcccgccgttgccatcgggttccccccctactatgcgcacaccgctgcgcccctgggacaggcccgcgccgtgggctaccccggggccccgccaccagccgcggacttcaaaatgctagccctgaccgaggcgcgcggaaagggccagtccgccaagctctacaacggccaccaccacctgctgatgactgagcagaactgggccaaccaggcggccgagcggcagcccccggcgctcaaggcttacccggcagcgtccacgcctgcagcccccagccccgtcggcagcagctccccgccactcgcgcacgaggctgaggcgggcgcggcgcccctgctgctggatgggagcggcagcagtctggaggggagcgccctggcagggacccccgaggaggaggagcaggccgtgaccaccgcggcccagatgcaccagccgcccttgcccctcggagacccaggtcgggccagcaaggccagcagggccagcagcgggcgggccagaccggaggacttggccatctag

SEQ ID NO: 80 - protein, 435 aa, Homo sapiens
MGDWSFLGRLLENAQEHSTVIGKVWLTVLFIFRILVLGAAAEDVWGDEQSDFTCNTQQPGCENVCYDRAFPISHIRFWALQIIFVSTPTLIYLGHVLHIVRMEEKKKEREEEEQLKRESPSPKEPPQDNPSSRDDRGRVRMAGALLRTYVFNIIFKTLFEVGFIAGQYFLYGFELKPLYRCDRWPCPNTVDCFISRPTEKTIFIIFMLAVACASLLLNMLEIYHLGWKKLKQGVTSRLGPDASEAPLGTADPPPLPPSSRPPAVAIGFPPYYAHTAAPLGQARAVGYPGAPPPAADFKMLALTEARGKGQSAKLYNGHHHLLMTEQNWANQAAERQPPALKAYPAASTPAAPSPVGSSSPPLAHEAEAGAAPLLLDGSGSSLEGSALAGTPEEEEQAVTTAAQMHQPPLPLGDPGRASKASRASSGRARPEDLAI

SEQ ID NO: 81 - DNA, 954 bp, Homo sapiens
  CDS (1)..(951)
atgggcgactggagctttctgggaagactcttagaaaatgcacaggagcactccacggtcatcggcaaggtttggctgaccgtgctgttcatcttccgcattttggtgctgggggccgcggccgaggacgtgtggggcgatgagcagtcagacttcacctgcaacacccagcagccgggctgcgagaacgtctgctacgacagggccttccccatctcccacatccgcttctgggcgctgcagatcatcttcgtgtccacgcccaccctcatctacctgggccacgtgctgcacatcgtgcgcatggaggagaagaagaaagagagggaggaggaggagcagctgaagagagagagccccagccccaaggagccaccgcaggacaatccctcgtcgcgggacgaccgcggcagggtgcgcatggccggcgcgctgctgcggacctacgtcttcaacatcatcttcaagacgctgttcgaggtgggcttcatcgccggccagtactttctgtacggcttcgagctgaagccgctctaccgctgcgaccgctggccctgccccaacacggtggactgcttcatctccaggcccacggagaagaccatcttcatcatcttcatgctggcggtggcctgcgcgtcactgctgctcaacatgctggagatataccacctgggctggaagaagctcaagcagggcgtgaccagccgcctcggcccggacgcctccgaggccccgctggggacagccgatcccccgcccctgctgctggatgggagcggcagcagtctggaggggagcgccctggcagggacccccgaggaggaggagcaggccgtgaccaccgcggcccagatgcaccagccgcccttgcccctcggagacccaggtcgggccagcaaggccagcagggccagcagcgggcgggccagaccggaggacttggccatctag

SEQ ID NO: 82 - protein, 317 aa, Homo sapiens
MGDWSFLGRLLENAQEHSTVIGKVWLTVLFIFRILVLGAAAEDVWGDEQSDFTCNTQQPGCENVCYDRAFPISHIRFWALQIIFVSTPTLIYLGHVLHIVRMEEKKKEREEEEQLKRESPSPKEPPQDNPSSRDDRGRVRMAGALLRTYVFNIIFKTLFEVGFIAGQYFLYGFELKPLYRCDRWPCPNTVDCFISRPTEKTIFIIFMLAVACASLLLNMLEIYHLGWKKLKQGVTSRLGPDASEAPLGTADPPPLLLDGSGSSLEGSALAGTPEEEEQAVTTAAQMHQPPLPLGDPGRASKASRASSGRARPEDLAI

SEQ ID NO: 83 - DNA, 1306 bp, Homo sapiens
  CDS (96)..(914)
ctcactatagggctcgagcgggcttgggccccccgggggccaaagggttccccaagaaccagaggagaaggccaccccgcctggaggcacaggccatgaggggctctcaggaggtgctgctgatgtggcttctggtgttggcagtgggcggcacagagcacgcctaccggcccggccgtagggtgtgtgctgtccgggctcacggggaccctgtctccgagtcgttcgtgcagcgtgtgtaccagcccttcctcaccacctgcgacgggcaccgggcctgcagcacctaccgaaccatctataggaccgcctaccgccgcagccctgggctggcccctgccaggcctcgctacgcgtgctgccccggctggaagaggaccagcgggcttcctggggcctgtggagcagcaatatgccagccgccatgccggaacggagggagctgtgtccagcctggccgctgccgctgccctgcaggatggcggggtgacacttgccagtcagatgtggatgaatgcagtgctaggaggggcggctgtccccagcgctgcgtcaacaccgccggcagttactggtgccagtgttgggaggggcacagcctgtctgcagacggtacactctgtgtgcccaagggagggccccccagggtggcccccaacccgacaggagtggacagtgcaatgaaggaagaagtgcagaggctgcagtccagggtggacctgctggaggagaagctgcagctggtgctggccccactgcacagcctggcctcgcaggcactggagcatgggctcccggaccccggcagcctcctggtgcactccttccagcagctcggccgcatcgactccctgagcgagcagatttccttcctggaggagcagctggggtcctgctcctgcaagaaagactcgtgactgcccagcgccccaggctggacttgagcccctcacgccgccctgcagcccccatgcccctgcccaacatgctgggggtccagaagccacctcggggtgactgagcggaaagccaggcagggccttcctcctcttcctcctccccttcctcgggaggctccccagaccctggcatgggatgggctgggatcttctctgtgaatccacccctggctacccccaccctggctaccccaacggcatcccaaggccaggtgggccctcagctgagggaaggtacgagctccctgctggagcctgggacccatggcacaggccaggcagcccggaggctgggtggggcctcagtgggggctgctgcctgacccccagcacaataaaaatgaaac

SEQ ID NO: 84 - protein, 273 aa, Homo sapiens
MRGSQEVLLMWLLVLAVGGTEHAYRPGRRVCAVRAHGDPVSESFVQRVYQPFLTTCDGHRACSTYRTIYRTAYRRSPGLAPARPRYACCPGWKRTSGLPGACGAAICQPPCRNGGSCVQPGRCRCPAGWRGDTCQSDVDECSARRGGCPQRCVNTAGSYWCQCWEGHSLSADGTLCVPKGGPPRVAPNPTGVDSAMKEEVQRLQSRVDLLEEKLQLVLAPLHSLASQALEHGLPDPGSLLVHSFQQLGRIDSLSEQISFLEEQLGSCSCKKDS

SEQ ID NO: 85 - DNA, 1307 bp, Homo sapiens
  CDS (150)..(896)
ccaagctggccctgcacggctgcaagggaggctcctgtggacaggccaggcaggtgggcctcaggaggtgcctccaggcggccagtgggcctgaggccccagcaagggctagggtccatctccagtcccaggacacagcagcggccaccatggccacgcctgggctccagcagcatcagcagcccccaggaccggggaggcacaggtggcccccaccacccggaggagcagctcctgcccctgtccgggggatgactgattctcctccgccagccgtagggtgtgtgctgtccgggctcacggggaccctgtctccgagtcgttcgtgcagcgtgtgtaccagcccttcctcaccacctgcgacgggcaccgggcctgcagcacctaccgcaatatgccagccgccatgccggaacggagggagctgtgtccagcctggccgctgccgctgccctgcaggatggcggggtgacacttgccagtcagatgtggatgaatgcagtgctaggaggggcggctgtccccagcgctgcgtcaacaccgccggcagttactggtgccagtgttgggaggggcacagcctgtctgcagacggtacactctgtgtgcccaagggagggccccccagggtggcccccaacccgacaggagtggacagtgcaatgaaggaagaagtgcagaggctgcagtccagggtggacctgctggaggagaagctgcagctggtgctggccccactgcacagcctggcctcgcaggcactggagcatgggctcccggaccccggcagcctcctggtgcactccttccagcagctcggccgcatcgactccctgagcgagcagatttccttcctggaggagcagctggggtcctgctcctgcaagaaagactcgtgactgcccagcgccccaggctggactgagcccctcacgccgccctgcagcccccatgcccctgcccaacatgctgggggtccagaagccacctcggggtgactgagcggaaggccaggcagggccttcctcctcttcctcctccccttcctcgggaggctccccagaccctggcatgggatgggctgggatcttctctgtgaatccacccctggctacccccaccctggttaccccaacggcatcccaaggccaggtgggccctcagctgagggaaggtacgagctccctgctggagcctgggacccatggcacaggccaggcagcccggaggctgggtggggcctcagtgggggctgctgcctgacccccagcacaataaaaatgaaacgtgaaaaaaaaaaaaaaaaa

SEQ ID NO: 86 - protein, 249 aa, Homo sapiens
MATPGLQQHQQPPGPGRHRWPPPPGGAAPAPVRGMTDSPPPAVGCVLSGLTGTLSPSRSCSVCTSPSSPPATGTGPAAPTAICQPPCRNGGSCVQPGRCRCPAGWRGDTCQSDVDECSARRGGCPQRCVNTAGSYWCQCWEGHSLSADGTLCVPKGGPPRVAPNPTGVDSAMKEEVQRLQSRVDLLEEKLQLVLAPLHSLASQALEHGLPDPGSLLVHSFQQLGRIDSLSEQISFLEEQLGSCSCKKDS

SEQ ID NO: 87 - DNA, 841 bp, Homo sapiens
  CDS (2)..(841)
caccggatccaccatgaggggctctcaggaggtgctgctgatgtggcttctggtgttggcagtgggcggcacagagcacgcctaccggcccggccgtagggtgtgtgctgtccgggctcacggggaccctgtctccgagtcgttcgtgcagcgtgtgtaccagcccttcctcaccacctgcgacgggcaccgggcctgcagcacctaccgaaccatctataggaccgcctaccgccgcagccctgggctggcccctgccaggcctcgctacgcgtgctgccccggctggaagaggaccagcgggcttcctggggcctgtggagcagcaatatgccagccgccatgccggaacggagggagctgtgtccagcctggccgctgccgctgccctgcaggatggcggggtgacacttgccagtcagatgtggatgaatgcagtgctaggaggggcggctgtccccagcgctgcgtcaacaccgccggcagttactggtgccagtgttgggaggggcacagcctgtctgcagacggtacactctgtgtgcccaagggagggccccccagggtggcccccaacccgacaggagtggacagtgcaatgaaggaagaagtgcagaggctgcagtccagggtggacctgctggaggagaagctgcagctggtgctggccccactgcacagcctggcctcgcaggcactggagcatgggctcccggaccccggcagcctcctggtgcactccttccagcagctcggccgcatcgactccctgagcgagcagatttccttcctggaggagcagctggggtcctgctcctgcaagaaagactcggtcgacggc

SEQ ID NO: 88 - protein, 280 aa, Homo sapiens
TGSTMRGSQEVLLMWLLVLAVGGTEHAYRPGRRVCAVRAHGDPVSESFVQRVYQPFLTTCDGHRACSTYRTIYRTAYRRSPGLAPARPRYACCPGWKRTSGLPGACGAAICQPPCRNGGSCVQPGRCRCPAGWRGDTCQSDVDECSARRGGCPQRCVNTAGSYWCQCWEGHSLSADGTLCVPKGGPPRVAPNPTGVDSAMKEEVQRLQSRVDLLEEKLQLVLAPLHSLASQALEHGLPDPGSLLVHSFQQLGRIDSLSEQISFLEEQLGSCSCKKDSVDG

SEQ ID NO: 89 - DNA, 769 bp, Homo sapiens
  CDS (2)..(769)
caccggatcctaccggcccggccgtagggtgtgtgctgtccgggctcacggggaccctgtctccgagtcgttcgtgcagcgtgtgtaccagcccttcctcaccacctgcgacgggcaccgggcctgcagcacctaccgaaccatctataggaccgcctaccgccgcagccctgggctggcccctgccaggcctcgctacgcgtgctgccccggctggaagaggaccagcgggcttcctggggcctgtggagcagcaatatgccagccgccatgccggaacggagggagctgtgtccagcctggccgctgccgctgccctgcaggatggcggggtgacacttgccagtcagatgtggatgaatgcagtgctaggaggggcggctgtccccagcgctgcgtcaacaccgccggcagttactggtgccagtgttgggaggggcacagcctgtctgcagacggtacactctgtgtgcccaagggagggccccccagggtggcccccaacccgacaggagtggacagtgcaatgaaggaagaagtgcagaggctgcagtccagggtggacctgctggaggagaagctgcagctggtgctggccccactgcacagcctggcctcgcaggcactggagcatgggctcccggaccccggcagcctcctggtgcactccttccagcagctcggccgcatcgactccctgagcgagcagatttccttcctggaggagcagctggggtcctgctcctgcaagaaagactcggtcgacggc

SEQ ID NO: 90 - protein, 256 aa, Homo sapiens
TGSYRPGRRVCAVRAHGDPVSESFVQRVYQPFLTTCDGHRACSTYRTIYRTAYRRSPGLAPARPRYACCPGWKRTSGLPGACGAAICQPPCRNGGSCVQPGRCRCPAGWRGDTCQSDVDECSARRGGCPQRCVNTAGSYWCQCWEGHSLSADGTLCVPKGGPPRVAPNPTGVDSAMKEEVQRLQSRVDLLEEKLQLVLAPLHSLASQALEHGLPDPGSLLVHSFQQLGRIDSLSEQISFLEEQLGSCSCKKDSVDG

SEQ ID NO: 91 - DNA, 841 bp, Homo sapiens; identical to SEQ ID NO: 87
  CDS (2)..(841)

SEQ ID NO: 92 - protein, 280 aa, Homo sapiens; identical to SEQ ID NO: 88

SEQ ID NO: 93 - DNA, 769 bp, Homo sapiens; identical to SEQ ID NO: 89
  CDS (2)..(769)

SEQ ID NO: 94 - protein, 256 aa, Homo sapiens; identical to SEQ ID NO: 90

SEQ ID NO: 95 - DNA, 1475 bp, Homo sapiens
  CDS (201)..(1079)
gggcctcaggaggtgcctccaggcggccagtgggcctgaggccccagcaagggctagggtccatctccagtcccaggacacagcagcggccaccatggccacgcctgggctccagcagcatcagcagcccccaggaccggggaggcacaggtggcccccaccacccggaggagcagctcctgcccctgtccgggggatgactgattctcctccgccaggccacccagaggagaaggccaccccgcctggaggcacaggccatgaggggctctcaggaggtgctgctgatgtggcttctggtgttggcagtgggcggcacagagcacgcctaccggcccggccgtagggtgtgtgctgtccgggctcacggggaccctgtctccgagtcgttcgtgcagcgtgtgtaccagcccttcctcaccacctgcgacgggcaccgggcctgcagcacctaccgaaccatctataggaccgcctaccgccgcagccctgggctggcccctgccaggcctcgctacgcgtgctgccccggctggaagaggaccagcgggcttcctggggcctgtggagcagcaatatgccagccgccatgccggaacggagggagctgtgtccagcctggccgctgccgctgccctgcaggatggcggggtgacacttgccagtcagatgtggatgaatgcagtgctaggaggggcggctgtccccagcgctgcgtcaacaccgccggcagttactggtgccagtgttgggaggggcacagcctgtctgcagacggtacactctgtgtgcccaagggagggccccccagggtggcccccaacccgacaggagtggacagtgcaatgaaggaagaagtgcagaggctgcagtccagggtggacctgctggaggagaagctgcagctggtgctggccccactgcacagcctggcctcgcaggcactggagcatgggctcccggaccccggcagcctcctggtgcactccttccagcagctcggccgcatcgactccctgagcgagcagatttccttcctggaggagcagctggggtcctgctcctgcaagaaagactcgtgactgcccagcgccccaagctggactgagcccctcacgccgccctgcagcccccatgcccctgcccaacatgctgggggtccagaagccacctcggggtgactgagcggaaggccaggcagggccttcctcctcttcctcctccccttcctcgggaggctccccagaccctggcatgggatgggctgggatcttctctgtgaatccacccctggctacccccaccctggctaccccaacggcatcccaaggccaggtgggccctcagctgagggaaggtacgagctccctgctggagcctgggacccatggcacaggccaggcagcccggaggctgggtggggcctcagtgggggctgctgcctgacccccagcacaataaaaatgaaacgtgac

SEQ ID NO: 96 - protein, 293 aa, Homo sapiens
LILLRQATQRRRPPRLEAQAMRGSQEVLLMWLLVLAVGGTEHAYRPGRRVCAVRAHGDPVSESFVQRVYQPFLTTCDGHRACSTYRTIYRTAYRRSPGLAPARPRYACCPGWKRTSGLPGACGAAICQPPCRNGGSCVQPGRCRCPAGWRGDTCQSDVDECSARRGGCPQRCVNTAGSYWCQCWEGHSLSADGTLCVPKGGPPRVAPNPTGVDSAMKEEVQRLQSRVDLLEEKLQLVLAPLHSLASQALEHGLPDPGSLLVHSFQQLGRIDSLSEQISFLEEQLGSCSCKKDS

SEQ ID NO: 97 - DNA, 1384 bp, Homo sapiens
  CDS (209)..(481)
ttttttttttttttttttttttttttttttttttttttttttttttttttttttttttttttttttttttttttttttttttttttttttttttttttttttttttttttttttttttttttgtcacgtttcatttttattgtgctgggggtcaggcagcagcccccactgaggccccacccagcctccgggctgcctggcctgtgccatgggtcccaggctccagcagggagctcgtaccttccctcagctgagggcccacctggccttgggatgccgttggggtagccagggtgggggtagccaggggtggattcacagagaagatcccagcccatcccatgccagggtctggggagcctcccgaggaaggggaggaggaagaggaggaaggccctgcctggccttccgctcagtcaccccgaggtggcttctggacccccagcatgttgggcaggggcatgggggctgcagggcggcgtgaggggctcagtccagcctggggcgctgggcagtcacgagtctttcttgcaggagcaggaccccagctgctcctccaggaaggaaatctgctcgctcagggagtcgatgcggccgagctgctggaaggagtgcaccaggaggctgccggggtccgggagcccatgctccagtgcctgcgaggccaggctgtgcagtggggccagcaccagctgcagcttctcctccagcaggtccaccctggactgcagcctctgcacttcttccttcattgcactgtccactcctgtcgggttgggggccaccctggggggccctcccttgggcacacagagtgtaccgtctgcagacaggctgtgcccctcccaacactggcaccagtaactgccggcggtgttgacgcagcgctggggacagccgcccctcctagcactgcattcatccacatctgactggcaagtgtcaccccgccatcctgcagggcagcggcagcggccaggctggacacagctccctccgttccggcatggcggctggcatattgctgctccacaggccccaggaagcccgctggtcctcttccagccggggcagcacgcgtagcgaggcctggcaggggccagcccagggctgcggcggtaggcggtcctatagatggttcggtaggtgctgcaggcccggtgcccgtcgcaggtggtgaggaagggctggtacacacgctgcacgaacgactcggagacagggtccccgtgagcccggacagcacacaccctacggccgggccggtaggcgtgctctgtgccgcccactgccaacaccagaagccacatcagcagcacctcctgagagcccctcatggcctgtgcctccaggcggggtggccttctcctctggttcttgggga

SEQ ID NO: 98 - protein, 91 aa, Homo sapiens
MGPRLQQGARTFPQLRAHLALGCRWGSQGGGSQGWIHREDPSPSHARVWGASRGRGGGRGGRPCLAFRSVTPRWLLDPQHVGQGHGGCRAA

SEQ ID NO: 99 - DNA, 1597 bp, Homo sapiens
  CDS (261)..(1079)
gggcctcaggaggtgcctccaggcggccagtgggcctgaggccccagcaagggctagggtccatctccagtcccaggacacagcagcggccaccatggccacgcctgggctccagcagcatcagcagcccccaggaccggggaggcacaggtggcccccaccacccggaggagcagctcctgcccctgtccgggggatgactgattctcctccgccaggccacccagaggagaaggccaccccgcctggaggcacaggccatgaggggctctcaggaggtgctgctgatgtggcttctggtgttggcagtgggcggcacagagcacgcctaccggcccggccgtagggtgtgtgctgtccgggctcacggggaccctgtctccgagtcgttcgtgcagcgtgtgtaccagcccttcctcaccacctgcgacgggcaccgggcctgcagcacctaccgaaccatctataggaccgcctaccgccgcagccctgggctggcccctgccaggcctcgctacgcgtgctgccccggctggaagaggaccagcgggcttcctggggcctgtggagcagcaatatgccagccgccatgccggaacggagggagctgtgtccagcctggccgctgccgctgccctgcaggatggcggggtgacacttgccagtcagatgtggatgaatgcagtgctaggaggggcggctgtccccagcgctgcgtcaacaccgccggcagttactggtgccagtgttgggaggggcacagcctgtctgcagacggtacactctgtgtgcccaagggagggccccccagggtggcccccaacccgacaggagtggacagtgcaatgaaggaagaagtgcagaggctgcagtccagggtggacctgctggaggagaagctgcagctggtgctggccccactgcacagcctggcctcgcaggcactggagcatgggctcccggaccccggcagcctcctggtgcactccttccagcagctcggccgcatcgactccctgagcgagcagatttccttcctggaggagcagctggggtcctgctcctgcaagaaagactcgtgactgcccagcgccccaagctggactgagcccctcacgccgccctgcagcccccatgcccctgcccaacatgctgggggtccagaagccacctcggggtgactgagcggaaggccaggcagggccttcctcctcttcctcctccccttcctcgggaggctccccagaccctggcatgggatgggctgggatcttctctgtgaatccacccctggctacccccaccctggctaccccaacggcatcccaaggccaggtgggccctcagctgagggaaggtacgagctccctgctggagcctgggacccatggcacaggccaggcagcccggaggctgggtggggcctcagtgggggctgctgcctgacccccagcacaataaaaatgaaacgtgacaaaaaaaaaaaaaaaaaaaaaaaaaaaaaaaaaaaaaaaaaaaaaaaaaaaaaaaaaaaaaaaaaaaaaaaaaaaaaaaaaaaaaaaaaaaaaaaaaaaaaaaaaaaaaaaaaaaaaaaaaa

SEQ ID NO: 100 - protein, 273 aa, Homo sapiens; identical to SEQ ID NO: 84

SEQ ID NO: 101 - DNA, 883 bp, Homo sapiens
  CDS (25)..(843)
tcaccccgcctggaggcacaggccatgaggggctctcaggaggtgctgctgatgtggcttctggtgttggcagtgggcggcacagagcacgcctaccggcccggccgtagggtgtgtgctgtccgggctcacggggaccctgtctccgagtcgttcgtgcagcgtgtgtaccagcccttcctcaccacctgcgacgggcaccgggcctgcagcacctaccgaaccatctataggaccgcctaccgccgcagccctgggctggcccctgccaggcctcgctacgcgtgctgccccggctggaagaggaccagcgggcttcctggggcctgtggagcagcaatatgccagccgccatgccggaacggagggagctgtgtccagcctggccgctgccgctgccctgcaggatggcggggtgacacttgccagtcagatgtggatgaatgcagtgctaggaggggcggctgtccccagcgctgcatcaacaccgccggcagttactggtgccagtgttgggaggggcacagcctgtctgcagacggtacactctgtgtgcccaagggagggccccccagggtggcccccaacccgacaggagtggacagtgcaatgaaggaagaagtgcagaggctgcagtccagggtggacctgctggaggagaagctgcagctggtgctggccccactgcacagcctggcctcgcaggcactggagcatgggctcccggaccccggcagcctcctggtgcactccttccagcagctcggccgcatcgactccctgagcgagcagatttccttcctggaggagcagctggggtcctgctcctgcaagaaagactcgtgacagcccagcgccccaggctggactgagcccctcacga

SEQ ID NO: 102 - protein, 273 aa, Homo sapiens [sequence omitted]

SEQ ID NO: 103 - DNA, 1303 bp, Homo sapiens
  CDS (31)..(1290)
atatccaatgggctgatttatctgacggtcatggccatggatgctggcaacccccctctcaacagcaccgtccctgtcaccatcgaggtgtttgatgagaatgacaaccctcccaccttcagcaagcccgcctacttcgtctccgtggtggagaacatcatggcaggagccacggtgctgttcctgaatgccacagacctggaccgctcccgggagtacggccaggagtccatcatctactccttggaaggctccacccagtttcggatcaatgcccgctcaggggaaatcaccaccacgtctctgcttgaccgagagaccaagtctgaatacatcctcatcgttcgcgcagtggacgggggtgtgggccacaaccagaaaactggcatcgccaccgtaaacatcaccctcctggacatcaacgacaaccaccccacgtggaaggacgcaccctactacatcaacctggtggagatgacccctccagactctgacgtgaccacggtggtggctgttgacccagacctgggggagaatggcaccctggtgtacagcatccagccacccaacaagttctacagcctcaacagcaccacgggcaagatccgcaccacccacgccatgctggaccgggagaaccccgacccccatgaggccgagctgatgcgcaaaatcgtcgtctctgttactgactgtggcaggccccctctgaaagccaccagcagtgccacagtgtttgtgaacctcttggatctcaatgacaatgaccccacctttcagaacctgccttttgtggccgaggtgcttgaaggcatcccggcgggggtctccatctaccaagtggtggccatcgacctcgatgagggcctgaacggcctggtgtcctaccgcatgccggtgggcatgccccgcatggacttcctcatcaacagcagcagcggcgtggtggtcaccaccaccgagctggaccgcgagcgcatcgcggagtaccagctgcgggtggtggccagtgatgcaggcacgcccaccaagagctccaccagcacgctcaccatccatgtgctggatgtgaacgacgagacgcccaccttcttcccggccgtgtacaatgtgtctgtgtccgaggacgtgccacgcgagttccgggtggtctggctgaactgcacggacaacgacgtgggcctcaatgcagagctcagctacttcatcacaggtgctgccccggcctccgcccacctgtgcaggcctcctggggccctgcctccacccctcccagatggacagccagactaggtgggggcag

SEQ ID NO: 104 - protein, 420 aa, Homo sapiens
MAMDAGNPPLNSTVPVTIEVFDENDNPPTFSKPAYFVSVVENIMAGATVLFLNATDLDRSREYGQESIIYSLEGSTQFRINARSGEITTTSLLDRETKSEYILIVRAVDGGVGHNQKTGIATVNITLLDINDNHPTWKDAPYYINLVEMTPPDSDVTTVVAVDPDLGENGTLVYSIQPPNKFYSLNSTTGKIRTTHAMLDRENPDPHEAELMRKIVVSVTDCGRPPLKATSSATVFVNLLDLNDNDPTFQNLPFVAEVLEGIPAGVSIYQVVAIDLDEGLNGLVSYRMPVGMPRMDFLINSSSGVVVTTTELDRERIAEYQLRVVASDAGTPTKSSTSTLTIHVLDVNDETPTFFPAVYNVSVSEDVPREFRVVWLNCTDNDVGLNAELSYFITGAAPASAHLCRPPGALPPPLPDGQPD

SEQ ID NO: 105 - DNA, 1113 bp, Homo sapiens
  CDS (1)..(1113)
ggatccgccacagacctggaccgctcccgggagtacggccaggagtccatcatctactccttggaaggctccacccagtttcggatcaatgcccgctcaggggaaatcaccaccacgtctctgcttgaccgagagaccaagtctgaatacatcctcatcgttcgcgcagtggacgggggtgtgggccacaaccagaaaactggcatcgccaccgtaaacatcaccctcctggacatcaatgacaaccaccccacgtggaaggacgcaccctactacatcaacctggtggagatgacccctccagactctgatgtgaccacggtggtggctgttgacccagacctgggagagaatggcaccctggtgtacagcatccagccacccaacaagttctacagcctcaacagcaccacgggcaagatccgcaccacccacgccatgctggaccgggagaaccccgacccccatgaggccgagctgatgcgcaaaatcgtcgtctctgttactgactgtggcaggccccctctgaaagccaccagcagtgccacagtgtttgtgaacctcttggatctcaatgacaatgaccccacctttcagaacctgccttttgtggccgaggtgcttgaaggcatcccggcgggggtctccatctaccaagtggtggccatcgacctcgatgagggcctgaacggcctggtgtcctaccgcatgccggtgggcatgccccgcatggacttcctcatcagcagcagcagcggcgtggtggtcaccaccaccgagctggaccgcgagcgcatcgcggagtaccagctgcgggtggtggccagtgatgcaggcacgcccaccaagagctccaccagcacgctcaccatccatgtgctggatgtgaacgacgagacgcccaccttcttcccggccgtgtacaatgtgtccgtgtccgaggacgtgccacgcgagttccgggtggtctggctgaactgcacggacaacgacgtgggcctcaatgcagagctcagctatttcatcacaggtgctgccccggcctccgcccacctgtgcaggcctcctggggccctgcctccacccctcccagatggacagccagacctcgag

SEQ ID NO: 106 - protein, 371 aa, Homo sapiens
GSATDLDRSREYGQESIIYSLEGSTQFRINARSGEITTTSLLDRETKSEYILIVRAVDGGVGHNQKTGIATVNITLLDINDNHPTWKDAPYYINLVEMTPPDSDVTTVVAVDPDLGENGTLVYSIQPPNKFYSLNSTTGKIRTTHAMLDRENPDPHEAELMRKIVVSVTDCGRPPLKATSSATVFVNLLDLNDNDPTFQNLPFVAEVLEGIPAGVSIYQVVAIDLDEGLNGLVSYRMPVGMPRMDFLISSSSGVVVTTTELDRERIAEYQLRVVASDAGTPTKSSTSTLTIHVLDVNDETPTFFPAVYNVSVSEDVPREFRVVWLNCTDNDVGLNAELSYFITGAAPASAHLCRPPGALPPPLPDGQPDLE

SEQ ID NO: 107 - DNA, 1114 bp, Homo sapiens
  CDS (2)..(1114)
ggatccgccacagacctggaccgctcccgggagtacggccaggagtccatcatctactccttggaaggctccacccagtttcggatcaatgcccgctccaggggaaatcaccaccacgtctctgcttgaccgagagaccaagtctgaatacatcctcatcgttcgcgcagtggacgggggtgtgggccacaaccagaaaactggcatcgccaccgtaaacatcaccctcctggacatcaatgacaaccaccccacgtggaaggacgcaccctactacatcaacctggtggagatgacccctccagactctgatgtgaccacggtggtggctgttgacccagacctgggggagaatggcaccctggtgtacagcatccagccacccaacaagttctacagcctcaacagcaccacgggcaagatccgcaccacccacgccatgctggaccgggagaaccccgacccccatgaggccgagctgatgcgcaaaatcgtcgtctctgttactgactgtggcaggccccctctgaaagccaccagcagtgccacagtgtttgtgaacctcttggatctcaatgacaatgaccccacctttcagaacctgccttttgtggccgaggtgcttgaaggcatcccggcgggggtctccatctaccaagtggtggccatcgacctcgatgagggcctgaacggcctggtgtcctaccgcatgctggtgggcatgccccacatggacttcctcatcaacagcagcagcggcgtggtggtcaccaccaccgagctggaccgcgagcgcatcgcgaagtaccagctgcgggtggtggccagtgatgcaggcacgcccaccaagagctccaccagcacgctcaccatccatgtgctggatgtgaacgacgagacgcccaccttcttcccggccgtgtacaatgtgtctgtgtccgaggacgtgccacgcgagttccgggtggtctggctgaactgcacggacaacgacgtgggcctcaatgcagagctcagctacttcatcacaggtgctgccccggcctccgcccacctgtgcaggcctcctggggccctgcctccacccctcccagatggacagccagacctcgag

SEQ ID NO: 108 - protein, 371 aa, Homo sapiens
DPPQTWTAPGSTARSPSSTPWKAPPSFGSMPAPGEITTTSLLDRETKSEYILIVRAVDGGVGHNQKTGIATVNITLLDINDNHPTWKDAPYYINLVEMTPPDSDVTTVVAVDPDLGENGTLVYSIQPPNKFYSLNSTTGKIRTTHAMLDRENPDPHEAELMRKIVVSVTDCGRPPLKATSSATVFVNLLDLNDNDPTFQNLPFVAEVLEGIPAGVSIYQVVAIDLDEGLNGLVSYRMLVGMPHMDFLINSSSGVVVTTTELDRERIAKYQLRVVASDAGTPTKSSTSTLTIHVLDVNDETPTFFPAVYNVSVSEDVPREFRVVWLNCTDNDVGLNAELSYFITGAAPASAHLCRPPGALPPPLPDGQPDLE

SEQ ID NO: 109 - DNA, 1114 bp, Homo sapiens
  CDS (2)..(1114)
ggatccgccacagacctggaccgctccccgggagtacggccaggagtccatcatctactccttggaaggctccacccagtttcggatcaatgcccgctcaggggaaatcaccaccacgtctctgcttgaccgagagaccaagtctgaatacatcctcatcgttcgcgcagtggacgggggtgtgggccacaaccagaaaactggcatcgccaccgtaaacatcaccctcctggacatcaatgacaaccaccccacgtggaaggacgcaccctactacatcaacctggtggagatgacccctccagactctgatgtgaccacggtggtggctgttgacccagacctgggggagaatggcaccctggtgtacagcatccagccacccaacaagttctacagcctcaacagcaccacgggcaagatccgcaccacccacgccatgctggaccgggagaaccccgacccccatgaggccgagctgatgcgcaaaatcgtcgtctctgttactgactgtggcaggccccctctgaaagccaccagcagtgccacagtgtttgtgaacctcttggatctcaatgacaatgaccccacctttcagaacctgccttttgtggccgaggtgcttgaaggcatcccggcgggggtctccatctaccaagtggtggccatcgacctcgatgagggcctgaacggcctggtgtcctaccgcatgccggtgggcatgccccgcatggacttcctcatcaacagcagcagcggcgtggtggtcaccaccaccgagctggaccgcgagcgcatcgcggagtaccagctgcgggtggtggccagtgatgcaggcacgcccaccaagagctccaccagcacgctcaccatccatgtgctggatgtgaacgacgagacgcccaccttcttcccggccgtgtacaatgtgtctgtgtccgaggacgtgccacgcgagttccgggtggtctggctgaactgcacggacaacgacgtgggcctcaatgcagagctcagctacttcatcacaggtgctgccccggcctccgcccacctgtgcaggcctcctggggccctgcctccacccctcccagatggacagccagacctcgag

SEQ ID NO: 110 - protein, 371 aa, Homo sapiens
DPPQTWTAPREYGQESIIYSLEGSTQFRINARSGEITTTSLLDRETKSEYILIVRAVDGGVGHNQKTGIATVNITLLDINDNHPTWKDAPYYINLVEMTPPDSDVTTVVAVDPDLGENGTLVYSIQPPNKFYSLNSTTGKIRTTHAMLDRENPDPHEAELMRKIVVSVTDCGRPPLKATSSATVFVNLLDLNDNDPTFQNLPFVAEVLEGIPAGVSIYQVVAIDLDEGLNGLVSYRMPVGMPRMDFLINSSSGVVVTTTELDRERIAEYQLRVVASDAGTPTKSSTSTLTIHVLDVNDETPTFFPAVYNVSVSEDVPREFRVVWLNCTDNDVGLNAELSYFITGAAPASAHLCRPPGALPPPLPDGQPDLE

SEQ ID NO: 111 - DNA, 1114 bp, Homo sapiens
ggatccgccacagacctggaccgctcccgggagtacggccaggagtccatcatctactccttggaaggctccacccagtttcggatcaatgcccgctcaggggaaatcaccaccacgtctctgcttgaccgagagaccaagtctgaatacatcctcatcgttcgcgcagtggacgggggtgtgggccacaaccagaaaactggcatcgccaccgtaaacatcaccctcctggacatcaacgacaaccaccccacgtggaaggacgcaccctactacatcaacctggtggagatgacccctccagactctgacgtgaccacggtggtggctgttgacccagacctgggggagaatggcaccctggtgtacagcatccagccacccaacaagttctacagcctcaacagcaccacgggcaagatccgcaccacccacgccatgctggaccgggagaaccccgacccccatgaggccgagctgatgcgcaaaatcgtcgtctctgttactgactgtggcaggccccctctgaaagccaccagcagtgccacagtgtttgtgaacctcttggatctcaatgacaatgaccccacctttcagaacctgccttttgtggccgaggtgcttgaaggcatcccggcgggggtctccatctaccaagtggtggccatcgacctcgatgagggcctgaacggcctggtgtcctaccgcatgccggtgggcatgccccgcatggacttcctcatcaacagcagcagcggcgtggtggtcaccaccaccgagctggaccgcgagcgcatcgcggagtaccagctgcgggtggtggccagtgatgcaggcacgcccaccaagagctccaccagcacgctcaccatccatgtgctggatgtgaacgacgagacgcccaccttcttcccggccgtgtacaatgtgtctgtgtccgaggacgtgccacgcgagttccgggtggtctggctgaactgcacggacaacgacgtgggcctcaatgcagagctcagctacttcatcacagggtgctgccccggcctccgcccacctgtgcaggcctcctggggccttgcctccacccctcccagatggacagccagacctcgag

SEQ ID NO: 112 - protein, 372 aa, Homo sapiens
  misc_feature (372)..(372): Wherein Xaa may be any naturally occurring amino acid
GSATDLDRSREYGQESIIYSLEGSTQFRINARSGEITTTSLLDRETKSEYILIVRAVDGGVGHNQKTGIATVNITLLDINDNHPTWKDAPYYINLVEMTPPDSDVTTVVAVDPDLGENGTLVYSIQPPNKFYSLNSTTGKIRTTHAMLDRENPDPHEAELMRKIVVSVTDCGRPPLKATSSATVFVNLLDLNDNDPTFQNLPFVAEVLEGIPAGVSIYQVVAIDLDEGLNGLVSYRMPVGMPRMDFLINSSSGVVVTTTELDRERIAEYQLRVVASDAGTPTKSSTSTLTIHVLDVNDETPTFFPAVYNVSVSEDVPREFRVVWLNCTDNDVGLNAELSYFITGCCPGLRPPVQASWGLASTPPRWTARPRX

SEQ ID NO: 113 - DNA, 1772 bp, Homo sapiens
  CDS (101)..(1672)
cttttgcactgatcatttctcttaattggcaggtaacaaggagggagcgcattcttccaccttctgggtgctgctgagtatctttctgggagcagtggccatgctgtgcaaagagcaagggatcactgtgctgggtttaaatgcggtatttgacatcttggtgataggcaaattcaatgttctggaaattgtccagaaggtactacataaggacaagtcattagagaatctcggcatgctcaggaacgggggcctcctcttcagaatgaccctgctcacctctggaggggctgggatgctctacgtgcgctggaggatcatgggcacgggcccgccggccttcaccgaggtggacaacccggcctcctttgctgacagcatgctggtgagggccgtaaactacaattactactattcattgaatgcctggctgctgctgtgtccctggtggctgtgttttgattggtcaatgggctgcatccccctcattaagtccatcagcgactggagggtaattgcacttgcagcactctggttctgcctaattggcctgatatgccaagccctgtgctctgaagacggccacaagagaaggatccttactctgggcctgggatttctcgttatcccatttctccccgcgagtaacctgttcttccgagtgggcttcgtggtcgcagagcgtgtcctctacctccccagcgttgggtactgtgtgctgctgacttttggattcggagccctgagcaaacataccaagaaaaagaaactcattgccgctgtcgtgctgggaatcttattcatcaacacgctgagatgtgtgctgcgcagcggcgagtggcggagtgaggaacagcttttcagaagtgctctgtctgtgtgtcccctcaatgctaaggtacactacaacattggcaaaaacctggctgataaaggcaaccagacagctgccatcagatactaccgggaagctgtaagattaaatcccaagtatgttcatgccatgaataatcttggaaatatcttaaaagaaaggaatgagctacaggaagctgaggagctgctgtctttggctgttcaaatacagccagactttgccgctgcgtggatgaatctaggcatagtgcagaatagcctgaaacggtttgaagcagcagagcaaagttaccggacagcaattaaacacagaaggaaatacccagactgttactacaacctcgggcgtctgtatgcagatctcaatcgccacgtggatgccttgaatgcgtggagaaatgccaccgtgctgaaaccagagcacagcctggcctggaacaacatgattatactcctcgacaatacaggtaatttagcccaagctgaagcagttggaagagaggcactggaattaatacctaatgatcactctctcatgttctcgttggcaaacgtgctggggaaatcccagaaatacaaggaatctgaagctttattcctcaaggcaattaaagcaaatccaaatgctgcaagttaccatggtaatttggctgtgctttatcatcgttggggacatctagacttggccaagaaacactatgaaatctccttgcagcttgaccccacggcatcaggaactaaggagaattacggtctgctgagaagaaagctagaactaatgcaaaagaaagctgtctgatcctgtttccttcatgttttgagtttgagtgtgtgtgtgcatgaggcatatcattaatagtatgtggttacatttaaccatttaaaagtcttagaca

SEQ ID NO: 114 - protein, 524 aa, Homo sapiens
MLCKEQGITVLGLNAVFDILVIGKFNVLEIVQKVLHKDKSLENLGMLRNGGLLFRMTLLTSGGAGMLYVRWRIMGTGPPAFTEVDNPASFADSMLVRAVNYNYYYSLNAWLLLCPWWLCFDWSMGCIPLIKSISDWRVIALAALWFCLIGLICQALCSEDGHKRRILTLGLGFLVIPFLPASNLFFRVGFVVAERVLYLPSVGYCVLLTFGFGALSKHTKKKKLIAAVVLGILFINTLRCVLRSGEWRSEEQLFRSALSVCPLNAKVHYNIGKNLADKGNQTAAIRYYREAVRLNPKYVHAMNNLGNILKERNELQEAEELLSLAVQIQPDFAAAWMNLGIVQNSLKRFEAAEQSYRTAIKHRRKYPDCYYNLGRLYADLNRHVDALNAWRNATVLKPEHSLAWNNMIILLDNTGNLAQAEAVGREALELIPNDHSLMFSLANVLGKSQKYKESEALFLKAIKANPNAASYHGNLAVLYHRWGHLDLAKKHYEISLQLDPTASGTKENYGLLRRKLELMQKKAV

SEQ ID NO: 115 - DNA, 1515 bp, Homo sapiens
  CDS (1)..(1515)
gaattcaaattcaatgttctggaaattgtccagaaggtactacataaggacaagtcattagagaatctcggcatgctcaggaacgggggcctcctcttcagaatgaccctgctcacctctggaggggctgggatgctctacgtgcgctggaggatcatgggcacgggcccgccggccttcaccgaggtggacaacccggcctcctttgctgacagcatgctggtgagggccgtaaactacaattactactattcattgaatgcctggctgctgctgtgtccctggtggctgtgttttgattggtcaatgggctgcatccccctcattaagtccatcagcgactggagggtaattgcacttgcagcactctggttctgcctaattggcctgatatgccaagccctgtgctctgaagacggccacaagagaaggatccttactctgggcctgggatttctcgttatcccatttctccctgcgagtaacctgttcttccgagtgggcttcgtggtcgcggagcgtgtcctctacctccccagcgttgggtactgtgtgctgctgacttttggattcggagccctgagcaaacataccaagaaaaagaaactcattgccgctgtcgtgctgggaatcttattcatcaacacgctgagatgtgtgctgcgcagcggcgagtggcggagtgaggaacagcttttcagaagtgctctgtctgtgtgtcccctcaatgctaaggttcactacaacattggcaaaaacctggctgataaaggcaaccagacagctgccatcagatactaccgggaagctgtaagattaaatcccaagtatgttcatgccatgaataatcttggaaatatcttaaaagaaaggaatgagctacaggaagctgaggagctgctgtctttggctgttcaaatacagccagactttgccgctgcgtggatgaatctaggcatagtgcagaatagcctgaaacggtttgaagcagcagagcaaagttaccggacagcaattaaacacagaaggaaatacccagactgttactacaacctcgggcgtctgtatgcagatctcaatcgccacgtggatgccttgaatgcgtggagaaatgccaccgtgctgaaaccagagcacagcctggcctggaacaacatgattatactcctcgacaatacaggtaatttagcccaagctgaagcagttggaagagaggcactggaattaatacctaatgatcactctctcatgttctcgttggcaaacgtgctggggaaatcccagaaatacaaggaatctgaagctttattcctcaaggcaattaaagcaaatccaaatgctgcaagttaccatggtaatttggctgtgctttatcatcgttggggacatctagacttggccaagaaacactatgaaatctccttgcagcttgaccccacggcatcaggaactaaggagaattacggtctgctgagaagaaagctagaactaatgcaaaagaaagctgtcctcgag

SEQ ID NO: 116 - protein, 505 aa, Homo sapiens
EFKFNVLEIVQKVLHKDKSLENLGMLRNGGLLFRMTLLTSGGAGMLYVRWRIMGTGPPAFTEVDNPASFADSMLVRAVNYNYYYSLNAWLLLCPWWLCFDWSMGCIPLIKSISDWRVIALAALWFCLIGLICQALCSEDGHKRRILTLGLGFLVIPFLPASNLFFRVGFVVAERVLYLPSVGYCVLLTFGFGALSKHTKKKKLIAAVVLGILFINTLRCVLRSGEWRSEEQLFRSALSVCPLNAKVHYNIGKNLADKGNQTAAIRYYREAVRLNPKYVHAMNNLGNILKERNELQEAEELLSLAVQIQPDFAAAWMNLGIVQNSLKRFEAAEQSYRTAIKHRRKYPDCYYNLGRLYADLNRHVDALNAWRNATVLKPEHSLAWNNMIILLDNTGNLAQAEAVGREALELIPNDHSLMFSLANVLGKSQKYKESEALFLKAIKANPNAASYHGNLAVLYHRWGHLDLAKKHYEISLQLDPTASGTKENYGLLRRKLELMQKKAVLE

SEQ ID NO: 117 - DNA, 1515 bp, Homo sapiens
  CDS (1)..(1515)
gaattcaaattcaatgttctggaaattgtccagaaggtactacataaggacaagtcattagagaatctcggcatgctcaggaacgggggcctcctcttcagaatgaccctgctcacctctggaggggctgggatgctctacgtgcgctggaggatcatgggcacgggcccgccggccttcaccgaggtggacaacccggcctcctttgctgacagcatgctggtgagggccgtaaactacaattactactattcattgaatgcctggctgctgctgtgtccctggtggctgtgttttgattggtcaatgggctgcacccccctcattaagtccatcagcgactggagggtaattgcacttgcagcactctggttctgcctaattggcctgatatgccaagccctgtgctctgaagacggccacaagagaaggatccttactctgggcctgggatttctcgttatcccatttctccctgcgagtaacctgttcttccgagtgggcttcgtggtcgcggagcgtgtcctctacctccccagcgttgggtactgtgtgctgctgacttttggattcggagccctgagcaaacataccaagaaaaagaaactcattgccgctgtcgtgctgggaatcttattcatcaacacgctgagatgtgtgctgcgcagcggcgagtggcggagtgaggaacagcttttcagaagtgctctgtctgtgtgtcccctcaatgctaaggttcactacaacattggcaaaaacctggctgataaaggcaaccagacagctgccatcagatactaccgggaagctgtaagattaaatcccaagtatgttcatgccatgaataatcttggaaatatcttaaaagaaaggaatgagctacaggaagctgaggagctgctgtctttggctgttcaaatacagccagactttgccgctgcgtggatgaatctaggcatagtgcagaatagcctgaaacggtttgaagcagcagagcaaagttaccggacagcaattaaacacagaaggaaatacccagactgttactacaacctcgggcgtctgtatgcagatctcaatcgccacgtggatgccttgaatgcgtggagaaatgccaccgtgctgaaaccagagcacagcctggcctggaacaacatgattatactcctcgacaatacaggtaatttagcccaagctgaagcagttggaagagaggcactggaattaatacctaatgatcactctctcatgttctcgttggcaaacgtgctggggaaatcccagaaatacaaggaatctgaagctttattcctcaaggcaattaaagcaaatccaaatgctgcaagttaccatggtaatttggctgtgctttatcatcgttgggggcatctagacttggccaagaaacactatgaaatctccttgcagcttgaccccacggcatcaggaactaaggagaattacggtctgctgagaagaaagctagaactaatgcaaaagaaagctgtcctcgag

SEQ ID NO: 118 - protein, 505 aa, Homo sapiens
EFKFNVLEIVQKVLHKDKSLENLGMLRNGGLLFRMTLLTSGGAGMLYVRWRIMGTGPPAFTEVDNPASFADSMLVRAVNYNYYYSLNAWLLLCPWWLCFDWSMGCTPLIKSISDWRVIALAALWFCLIGLICQALCSEDGHKRRILTLGLGFLVIPFLPASNLFFRVGFVVAERVLYLPSVGYCVLLTFGFGALSKHTKKKKLIAAVVLGILFINTLRCVLRSGEWRSEEQLFRSALSVCPLNAKVHYNIGKNLADKGNQTAAIRYYREAVRLNPKYVHAMNNLGNILKERNELQEAEELLSLAVQIQPDFAAAWMNLGIVQNSLKRFEAAEQSYRTAIKHRRKYPDCYYNLGRLYADLNRHVDALNAWRNATVLKPEHSLAWNNMIILLDNTGNLAQAEAVGREALELIPNDHSLMFSLANVLGKSQKYKESEALFLKAIKANPNAASYHGNLAVLYHRWGHLDLAKKHYEISLQLDPTASGTKENYGLLRRKLELMQKKAVLE

SEQ ID NO: 119 - DNA, 1515 bp, Homo sapiens
  CDS (1)..(1515)
gaattcaaattcaatgttctggaaattgtccagaaggtactacataaggacaagtcattagagaatctcggcatgctcaggaacgggggcctcctcttcagaatgaccctgctcacctctggaggggctgggatgctctacgtgcgctggaggatcatgggcacgggcccgccggccttcaccgaggtggacaacccggcctcctttgctgacagcatgctggtgagggccgtaaactacaattactactattcattgaatgcctggctgctgctgtgtccctggtggctgtgttttgattggtcaatgggctgcatccccctcattaagtccatcagcgactggagggtaattgcacttgcagcactctggttctgcctaattggcctgatatgccaagccctgtgctctgaagacggccacaagagaaggatccttactctgggcctgggatttctcgttatcccatttctccctgcgagtaacctgttcttccgagtgggcttcgtggtcgcggagcgtgtcctctacctccccagcgttgggtactgtgtgctgctgacttttggattcggagccctgagcaaacataccaagaaaaagaaactcattgccgctgtcgtgctgggaatcttattcatcaacacgctgagatgtgtgctgcgcagcggcgagtggcggagtgaggaacagcttttcagaagtgctctgtctgtgtgtcccctcaatgctaaggttcactacaacattggcaaaaacctggctgataaaggcaaccagacagctgccatcagatactaccgggaggctgtaagattaaatcccaagtatgttcatgccatgaataatcttggaaatatcttaaaagaaaggaatgagctacaggaagctgaggagctgctgtctttggctgttcaaatacagccagactttgccgctgcgtggatgaatctaggcatagtgcagaatagcctgaaacggtttgaagcagcagagcaaagttaccggacagcaattaaacacagaaggaaatacccagactgttactacaacctcgggcgtctgtatgcagatctcaatcgccacgtggatgccttgaatgcgtggagaaatgccaccgtgctgaaaccagagcacagcctggcctggaacaacatgattacactcctcgacaatacaggtaatttagcccaagctgaagcagttggaagagaggcactggaattaatacctaatgatcactctctcatgttctcgttggcaaacgtgctggggaaatcccagaaatacaaggaatctgaagctttattcctcaaggcaattaaagcaaatccaaatgctgcaagttaccatggtaatttggctgtgctttatcatcgttggggacatctagacttggccaagaaacactatgaaatctccttgcagcttgaccccacggcatcaggaactaaggagaattacggtctgctgagaagaaagctagaactaatgcaaaagaaagctgtcctcgag

SEQ ID NO: 120 - protein, 505 aa, Homo sapiens
EFKFNVLEIVQKVLHKDKSLENLGMLRNGGLLFRMTLLTSGGAGMLYVRWRIMGTGPPAFTEVDNPASFADSMLVRAVNYNYYYSLNAWLLLCPWWLCFDWSMGCIPLIKSISDWRVIALAALWFCLIGLICQALCSEDGHKRRILTLGLGFLVIPFLPASNLFFRVGFVVAERVLYLPSVGYCVLLTFGFGALSKHTKKKKLIAAVVLGILFINTLRCVLRSGEWRSEEQLFRSALSVCPLNAKVHYNIGKNLADKGNQTAAIRYYREAVRLNPKYVHAMNNLGNILKERNELQEAEELLSLAVQIQPDFAAAWMNLGIVQNSLKRFEAAEQSYRTAIKHRRKYPDCYYNLGRLYADLNRHVDALNAWRNATVLKPEHSLAWNNMITLLDNTGNLAQAEAVGREALELIPNDHSLMFSLANVLGKSQKYKESEALFLKAIKANPNAASYHGNLAVLYHRWGHLDLAKKHYEISLQLDPTASGTKENYGLLRRKLELMQKKAVLE

SEQ ID NO: 121 - DNA, 1515 bp, Homo sapiens
  CDS (1)..(1515)
gaattcaaattcaatgttctggaaattgtccagaaggtactacataaggacaagtcattagagaatctcggcatgctcaggaacgggggcctcctcttcagaatgaccctgctcacctctggaggggctgggatgctctacgtgcgctggaggatcatgggcacgggcccgccggccttcaccgaggtggacaacccggccccctttgctgacagcatgctggtgagggccgtaaactacaattactactattcattgaatgcctggctgctgctgtgtccctggtggctgtgttttgattggtcaatgggctgcatccccctcattaagtccatcagcgactggagggtaattgcacttgcagcactctggttctgcctaattggcccgatatgccaagccctgtgctctgaagacggccacaagagaaggatccttactctgggcctgggatttctcgttatcccatttctccctgcgagtaacctgttcttccgagtgggcttcgtggtcgcggagcgtgtcctctacctccccagcgttgggtactgtgtgctgctgacttttggattcggagccctgagcaaacataccaagaaaaagaaactcattgccgctgtcgtgctgggaatcttattcatcaacacgctgagatgtgtgctgcgcagcggcgagtggcggagtgaggaacagcttttcagaagtgctctgtctgtgtgtcccctcaatgctaaggttcactacaacattggcaaaaacctggctgataaaggcaaccagacagctgccatcagatactaccgggaagctgtaagattaaatcccaagtatgttcatgccatgaataatcttggaaatatcttaaaagaaaggaatgagctacaggaagctgaggagctgctgtctttggctgttcaaatacagccagactttgccgctgcgtggatgaatctaggcatagtgcagaatagcctgaaacggtttgaagcagcagagcaaagttaccggacagcaattaaacacagaaggaaatacccagactgttactacaacctcgggcgtctgtatgcagatctcaatcgccacgtggatgccttgaatgcgtggagaaatgccaccgtgctgaaaccagagcacagcctggcctggaacaacatgattatactcctcgacaatacaggtaatttagcccaagctgaagcagttggaagagaggcactggaattaatacctaatgatcactctctcatgttctcgttggcaaacgtgctggggaaatcccagaaatacaaggaatctgaagctttattcctcaaggcaattaaagcaaatccaaatgctgcaagttaccatggtaatttggctgtgctttatcatcgttggggacatctagacttggccaagaaacactatgaaatctccttgcagcttgaccccacggcatcaggaactaaggagaattacggtctgctgagaagaaagctagaactaatgcaaaagaaagctgtcctcgag

SEQ ID NO: 122 - protein, 505 aa, Homo sapiens
EFKFNVLEIVQKVLHKDKSLENLGMLRNGGLLFRMTLLTSGGAGMLYVRWRIMGTGPPAFTEVDNPAPFADSMLVRAVNYNYYYSLNAWLLLCPWWLCFDWSMGCIPLIKSISDWRVIALAALWFCLIGPICQALCSEDGHKRRILTLGLGFLVIPFLPASNLFFRVGFVVAERVLYLPSVGYCVLLTFGFGALSKHTKKKKLIAAVVLGILFINTLRCVLRSGEWRSEEQLFRSALSVCPLNAKVHYNIGKNLADKGNQTAAIRYYREAVRLNPKYVHAMNNLGNILKERNELQEAEELLSLAVQIQPDFAAAWMNLGIVQNSLKRFEAAEQSYRTAIKHRRKYPDCYYNLGRLYADLNRHVDALNAWRNATVLKPEHSLAWNNMIILLDNTGNLAQAEAVGREALELIPNDHSLMFSLANVLGKSQKYKESEALFLKAIKANPNAASYHGNLAVLYHRWGHLDLAKKHYEISLQLDPTASGTKENYGLLRRKLELMQKKAVLE

SEQ ID NO: 123 - DNA, 1515 bp, Homo sapiens
  CDS (1)..(1515)
gaattcaaattcaatgttctggaaattgtccagaaggtactacataaggacaagtcattagagaatctcggcatgctcaggaacgggggcctcctcttcagaatgaccctgctcacctctggaggggctgggatgctctacgtgcgctggaggatcatgggcacgggcccgccggccttcaccgaggtggacaacccggcctcctttgctgacagcatgctggtgagggccgtaaactacaattactactattcattgaatgcctggctgctgctgtgtccctggtggctgtgttttgattggtcaatgggctgcatccccctcattaagtccatcagcgactggagggtaattgcacttgcagcactctggttctgcctaattggcctgatatgccaagccctgtgctctgaagacggccacaagagaaggatccttactctgggcctgggatttctcgttatcccatttctccctgcgagtaacctgttcttccgagtgggcttcgtggtcgcggagcgtgtcctctacctccccagcgttgggtactgtgtgctgctgacttttggattcggagccctgagcaaacataccaagaaaaagaaactcattgccgctgtcgtgctgggaatcttattcatcaacacgctgagatgtgtgctgcgcagcggcgagtggcggagtgaggaacagcttttcagaagtgctctgtctgtgtgtcccctcaatgctaaggttcactacaacattggcaaaaacctggctgataaaggcaaccagacagctgccatcagatactaccgggaagctgtaagattaaatcccaagtatgttcatgccatgaataatcttggaaatatcttaaaagaaaggaatgagctacaggaagctgaggagctgctgtctttggctgttcaaatacagccagactttgccgctgcgtggatgaatctaggcatagtgcagaatagcctgaaacggtttgaagcagcagagcaaagttaccggacagcaattaaacacagaaggaaatacccagactgttactacaacctcgggcgtctgtatgcagatctcaatcgccacgtggatgccttgaatgcgtggagaaatgccaccgtgctgaaaccagagcacagcctggcctggaacaacatgattatactcctcgacaatacaggtaatttagcccaagctgaagcagttggaagagaggcactggaattaatacctaatgatcactctctcatgttctcgttggcaaacgtgctggggaaatcccagaaatacaaggaatctgaagctttattcctcaaggcaattaaagcaaatccaaatgctgcaagttaccatggtaatttggctgtgctttatcatcgttggggacatctagacttggccaagaaacactatgaaatctccttgcagcttgaccccacggcatcaggaactaaggagaattacggtctgctgagaggaaagctagaactaatgcaaaagaaagctgtcctcgag

SEQ ID NO: 124 - protein, 505 aa, Homo sapiens
EFKFNVLEIVQKVLHKDKSLENLGMLRNGGLLFRMTLLTSGGAGMLYVRWRIMGTGPPAFTEVDNPASFADSMLVRAVNYNYYYSLNAWLLLCPWWLCFDWSMGCIPLIKSISDWRVIALAALWFCLIGLICQALCSEDGHKRRILTLGLGFLVIPFLPASNLFFRVGFVVAERVLYLPSVGYCVLLTFGFGALSKHTKKKKLIAAVVLGILFINTLRCVLRSGEWRSEEQLFRSALSVCPLNAKVHYNIGKNLADKGNQTAAIRYYREAVRLNPKYVHAMNNLGNILKERNELQEAEELLSLAVQIQPDFAAAWMNLGIVQNSLKRFEAAEQSYRTAIKHRRKYPDCYYNLGRLYADLNRHVDALNAWRNATVLKPEHSLAWNNMIILLDNTGNLAQAEAVGREALELIPNDHSLMFSLANVLGKSQKYKESEALFLKAIKANPNAASYHGNLAVLYHRWGHLDLAKKHYEISLQLDPTASGTKENYGLLRGKLELMQKKAVLE

SEQ ID NO: 125 - DNA, 1515 bp, Homo sapiens
  CDS (1)..(1515)
gaattcaaattcaatgttctggaaattgtccagaaggtactacataaggacaagtcattagagaatctcggcatgctcaggaacgggggcctcctcttcagaatgaccctgctcacctctggaggggctgggatgctctacgtgcgctggaggatcatgggcacgggcccgccggccttcaccgaggtggacaacccggcctcctttgctgacagcatgctggtgagggccgtaaactacaattactactattcattgaatgcctggctgctgctgtgtccctggtggctgtgttttgattggtcaatgggctgcatccccctcattaagtccatcagcgactggagggtaattgcacttgcagcactctggttctgcctaattggcctgatatgccaagccctgtgctctgaagacggccacaagagaaggatccttactctgggcctgggatttctcgttatcccatttctccccgcgagtaacctgttcttccgagtgggcttcgtggtcgcggagcgtgtcctctacctccccagcgttgggtactgtgtgctgctgacttttggattcggagccctgagcaaacataccaagaaaaagaaactcattgccgctgtcgtgctgggaatcttattcatcaacacgctgagatgtgtgctgcgcagcggcgagtggcggagtgaggaacagcttttcagaagtgctctgtctgtgtgtcccctcaatgctaaggttcactacaacattggcaaaaacctggctgataaaggcaaccagacagctgccatcagatactaccgggaagctgtaagattaaatcccaagtatgttcatgccatgaataatcttggaaatatcttaaaagaaaggaatgagctacaggaagctgaggagctgctgtctttggctgttcaaatacagccagactttgccgctgcgtggatgaatctaggcatagtgcagaatagcctgaaacggtttgaagcagcagagcaaagttaccggacagcaattaaacacagaaggaaatacccagactgttactacaacctcgggcgtctgtatgcagatctcaatcgccacgtggatgccttgaatgcgtggagaaatgccaccgtgctgaaaccagagcacagcctggcctggaacaacatgattatactcctcgacaatacaggtaatttagcccaagctgaagcagttggaagagaggcactggaattaatacctaatgatcactctctcatgttctcgttggcaaacgtgctggggaaatcccagaaatacaaggaatctgaagctttattcctcaaggcaattaaagcaaatccaaatgctgcaagttaccatggtaatttggctgtgctttatcatcgttggggacatctagacttggccaagaaacactatgaaatctccttgcagcttgaccccacggcatcaggaactaaggagaattacggtctgctgagaagaaagctagaactaatgcaaaagaaagctgtcctcgag

SEQ ID NO: 126 - protein, 505 aa, Homo sapiens; identical to SEQ ID NO: 116

SEQ ID NO: 127 - DNA, 1515 bp, Homo sapiens
  CDS (1)..(1515)
gaattcaaattcaatgttctggaaattgtccagaaggtactacataaggacaagtcattagagaatctcggcatgctcaggaacgggggcctcctcttcagaatgaccctgctcacctctggaggggctgggatgctctacgtgcgctggaggatcatgggcacgggcccgccggccttcaccgaggtggacaacccggcctcctttgctgacagcatgctggtgagggccgtaaactacaattactactattcattgaatgcctggctgctgctgtgtccctggtggctgtgttttgattggtcaatgggctgcatccccctcattaagtccatcagcgactggagggtaattgcacttgcagcactctggttctgcctaattggcctgatatgccaagccctgtgctctgaagacggccacaagagaaggatccttactctgggcctgggatttctcgttatcccatttctccccgcgagtaacctgttcttccgagtgggcttcgtggtcgcggagcgtgtcctctacctccccagcgttgggtactgtgtgctgctgacttttggattcggagccctgagcaaacataccaagaaaaagaaactcattgccgctgtcgtgctgggaatcttattcatcaacacgctgagatgtgtgctgcgcagcggcgagtggcggagtgaggaacagcttttcagaagtgctctgtctgtgtgtcccctcaatgctaaggttcactacaacattggcaaaaacctggctgataaaggcaaccagacagcagccatcagatactaccgggaagctgtaagattaaatcccaagtatgttcatgccatgaataatcttggaaatatcttaaaagaaaggaatgagctacaggaagctgaggagctgctgtctttggctgttcaaatacagccagactttgccgctgcgtggatgaatctaggcatagtgcagaatagcctgaaacggtttgaagcagcagagcaaagttaccggacagcaattaaacacagaaggaaatacccagactgttactacaacctcgggcgtctgtatgcagatctcaatcgccacgtggatgccttgaatgcgtggagaaatgccaccgtgctgaaaccagagcacagcctggcctggaacaacatgattatactcctcgacaatacaggtaatttagcccaagctgaagcagttggaagagaggcactggaattaatacctaatgatcactctctcatgttctcgttggcaaacgtgctggggaaatcccagaaatacaaggaatctgaagctttattcctcaaggcaattaaagcaaatccaaatgctgcaagttaccatggtaatttggctgtgctttatcatcgttggggacatctaggcttggccaagaaacactatgaaatctccttgcagcttgaccccacggcatcaggaactaaggagaattacggtctgctgagaagaaagctagaactaatgcaaaagaaagctgtcctcgag

SEQ ID NO: 128 - protein, 505 aa, Homo sapiens
EFKFNVLEIVQKVLHKDKSLENLGMLRNGGLLFRMTLLTSGGAGMLYVRWRIMGTGPPAFTEVDNPASFADSMLVRAVNYNYYYSLNAWLLLCPWWLCFDWSMGCIPLIKSISDWRVIALAALWFCLIGLICQALCSEDGHKRRILTLGLGFLVIPFLPASNLFFRVGFVVAERVLYLPSVGYCVLLTFGFGALSKHTKKKKLIAAVVLGILFINTLRCVLRSGEWRSEEQLFRSALSVCPLNAKVHYNIGKNLADKGNQTAAIRYYREAVRLNPKYVHAMNNLGNILKERNELQEAEELLSLAVQIQPDFAAAWMNLGIVQNSLKRFEAAEQSYRTAIKHRRKYPDCYYNLGRLYADLNRHVDALNAWRNATVLKPEHSLAWNNMIILLDNTGNLAQAEAVGREALELIPNDHSLMFSLANVLGKSQKYKESEALFLKAIKANPNAASYHGNLAVLYHRWGHLGLAKKHYEISLQLDPTASGTKENYGLLRRKLELMQKKAVLE

SEQ ID NO: 129 - DNA, 1515 bp, Homo sapiens
  CDS (1)..(1515)
gaattcaaattcaatgttctggaaattgtccagaaggtactacataaggacaagtcattagagaatctcggcatgctcaggaacgggggcctcctcttcagaatgaccctgctcacctctggaggggctgggatgctctacgtgcgctggaggatcatgggcacgggcccgccggccttcaccgaggtggacaacccggcctcctttgctgacagcatgctggtgagggccgtaaactacaattactactattcattgaatgcctggctgctgctgtgtccctggtggctgtgttttgattggtcaatgggctgcatccccctcattaagtccatcagcgactggagggtaattgcacttgcagcactctggttctgcctaattggcctgatatgccaagccctgtgctctgaagacggccacaagagaaggatccttactctgggcctgggatttctcgttatcccatttctccccgcgagtaacctgttcttccgagtgggcttcgtggtcgcagagcgtgtcctctacctccccagcgttgggtactgtgtgctgctgacttttggattcggagccctgagcaaacataccaagaaaaagaaactcattgccgctgtcgtgctgggaatcttattcatcaacacgctgagatgtgtgctgcgcagcggcgagtggcggagtgaggaacagcttttcagaagtgctctgtctgtgtgtcccctcaatgctaaggttcactacaacattggcaaaaacctggctgataaaggcaaccagacagctgccatcagatactaccgggaagctgtaagattaaatcccaagtatgttcatgccatgaataatcttggaaatatcttaaaagaaaggaatgagctacaggaagctgaggagctgctgtctttggctgttcaaatacagccagactttgccgctgcgtggatgaatctaggcatagtgcagaatagcctgaaacggtttgaagcagcagagcaaagttaccggacagcaattaaacacagaaggaaatacccagactgttactacaacctcgggcgtctgtatgcagatctcaatcgccacgtggatgccttgaatgcgtggagaaatgccaccgtgctgaaaccagagcacagcctggcctggaacaacatgattatactcctcgacaatacaggtaatttagcccaagctgaagcagttggaagagaggcactggaattaatacctaatgatcactctctcatgttctcgttggcaaacgtgctggggaaatcccagaaatacaaggaatctgaagctttattcctcaaggcaattaaagcaaatccaaatgctgcaagttaccgtggtaatttggctgtgctttatcatcgttggggacatctagacttggccaagaaacactatgaaatctcctcgcagcttgaccccacggcatcaggaactaaggagaattacggtctgctgagaagaaagctagaactaatgcaaaagaaagctgtcctcgag

SEQ ID NO: 130 - protein, 505 aa, Homo sapiens
EFKFNVLEIVQKVLHKDKSLENLGMLRNGGLLFRMTLLTSGGAGMLYVRWRIMGTGPPAFTEVDNPASFADSMLVRAVNYNYYYSLNAWLLLCPWWLCFDWSMGCIPLIKSISDWRVIALAALWFCLIGLICQALCSEDGHKRRILTLGLGFLVIPFLPASNLFFRVGFVVAERVLYLPSVGYCVLLTFGFGALSKHTKKKKLIAAVVLGILFINTLRCVLRSGEWRSEEQLFRSALSVCPLNAKVHYNIGKNLADKGNQTAAIRYYREAVRLNPKYVHAMNNLGNILKERNELQEAEELLSLAVQIQPDFAAAWMNLGIVQNSLKRFEAAEQSYRTAIKHRRKYPDCYYNLGRLYADLNRHVDALNAWRNATVLKPEHSLAWNNMIILLDNTGNLAQAEAVGREALELIPNDHSLMFSLANVLGKSQKYKESEALFLKAIKANPNAASYRGNLAVLYHRWGHLDLAKKHYEISSQLDPTASGTKENYGLLRRKLELMQKKAVLE

SEQ ID NO: 131 - DNA, 1515 bp, Homo sapiens
  CDS (1)..(1515)
gaattcaaattcaatgttctggaaattgtccagaaggtactacataaggacaagtcattagagaatctcggcatgctcaggaacgggggcctcctcttcagaatgaccctgctcacctctggaggggctgggatactctacgtgcgctggaggatcatgggcacgggcccgccggccttcaccgaggtggacaacccggcctcctttgctgacagcatgctggtgagggccgtaaactacaattactactattcattgaatgcctggctgctgctgtgtccctggtggctgtgttttgattggtcaatgggctgcatccccctcattaagtccatcagcgactggagggtaattgcacttgcagcactctggttctgcctaattggcctgatatgccaagccctgtgctctgaagacggccacaagagaaggatccttactctgggcctgggatttctcgttatcccatttctccccgcgagtaacctgttcttccgagtgggcttcgtggtcgcagagcgtgtcctctacctccccagcgttgggtactgtgtgctgctgacttttggattcggagccctgagcaaacataccaagaaaaagaaactcattgccgctgtcgtgctgggaatcttattcatcaacacgctgagatgtgtgctgcgcagcggcgagtggcggagtgaggaacagcttttcagaagtgctctgtctgtgtgtcccctcaatgctaaggttcactacaacattggcaaaaacctggctgataaaggcaaccaaacagctgccatcagatactaccgggaagctgtaagattaaatcccaagtatgttcatgccatgaataatcttggaaatatcttaaaagaaaggaatgagctacaggaagctgaggagctgctgtctttggctgttcaaatacagccagactttgccgctgcgtggatgaatctaggcatagtgcagaatagcctgaaacggtttgaagcagcagagcaaagttaccggacagcaattaaacacagaaggaaatacccagactgttactacaacctcgggcgtctgtatgcagatctcaatcgccacgtggatgccttgaatgcgtggagaaatgccaccgtgctgaaaccagagcacagcctggcctggaacaacatgattatactcctcgacaatacaggtaatttagcccaagctgaagcagttggaagagaggcactggaattaatacctaatgatcactctctcatgttctcgttggcaaacgtgctggggaaatcccagaaatacaaggaatctgaagctttattcctcaaggcaattaaagcaaatccaaatgctgcaagttaccatggtaatttggctgtgctttatcatcgttggggacatctagacttggccaagaaacactatgaaatctccttgcagcttgaccccacggcatcaggaactaaggagaattacggtctgctgagaagaaagctagaactaatgcaaaagaaagctgtcctcgag

SEQ ID NO: 132 - protein, 505 aa, Homo sapiens
EFKFNVLEIVQKVLHKDKSLENLGMLRNGGLLFRMTLLTSGGAGILYVRWRIMGTGPPAFTEVDNPASFADSMLVRAVNYNYYYSLNAWLLLCPWWLCFDWSMGCIPLIKSISDWRVIALAALWFCLIGLICQALCSEDGHKRRILTLGLGFLVIPFLPASNLFFRVGFVVAERVLYLPSVGYCVLLTFGFGALSKHTKKKKLIAAVVLGILFINTLRCVLRSGEWRSEEQLFRSALSVCPLNAKVHYNIGKNLADKGNQTAAIRYYREAVRLNPKYVHAMNNLGNILKERNELQEAEELLSLAVQIQPDFAAAWMNLGIVQNSLKRFEAAEQSYRTAIKHRRKYPDCYYNLGRLYADLNRHVDALNAWRNATVLKPEHSLAWNNMIILLDNTGNLAQAEAVGREALELIPNDHSLMFSLANVLGKSQKYKESEALFLKAIKANPNAASYHGNLAVLYHRWGHLDLAKKHYEISLQLDPTASGTKENYGLLRRKLELMQKKAVLE

SEQ ID NO: 133 - DNA, 1515 bp, Homo sapiens
  CDS (1)..(1515)
gaattcaaattcaatgttctggaaattgtccagaaggtactacataaggacaagtcattagagaatctcggcatgctcaggaacgggggcctcctcttcagaatgaccctgctcacctctggaggggctgggatgctctacgtgcgctggaggatcatgggcacgggcccgccggccttcaccgaggtggacaacccggcctcctttgctgacagcatgctggtgagggccgtaaactacaattactactattcattgaatgcctggctgctgctgtgtccctggtggctgtgttttgattggtcaatgggctgcatccccctcattaagtccatcagcgactggagggtaattgcacttgcagcactctggttctgcctaattggcctgatatgccaagccctgtgctctgaagacggccacaagagaaggatccttactctgggcctgggatttctcgttatcccatttctccccgcgagtaacctgttcttccgagtgggcttcgtggtcgcggagcgtgtcctctacctccccagcattgggtactgtgtgctgctgacttttggattcggagccctgagcaaacataccaagaaaaagaaactcattgccgctgtcgtgctgggaatcttattcatcaacacgctgagatgtgtgctgcgcagcggcgagtggcggagtgaggaacagcttttcagaagtgctctgtctgtgtgtcccctcaatgctaaggttcactacaacattggcaaaaacctggctgataaaggcaaccagacagctgccatcagatactaccgggaagccgtaagattaaatcccaagtatgttcatgccatgaataatcttggaaatatcttaaaagaaaggaatgagctacaggaagctgaggagctgctgtctttggctgttcaaatacagccagactttgccgctgcgtggatgaatctaggcatagtgcagaatagcctgaaacggtttgaagcagcagagcaaagttaccggacagcaattaaacacagaaggaaatacccagactgttactacaacctcgggcgtctgtatgcagatctcaatcgccacgtggatgccttgaatgcgtggagaaatgccaccgtgctgaaaccagagcacagcctggcctggaacaacatgattatactcctcgacaatacaggtaatttagcccaagctgaagcagttggaagagaggcactggaattaatacctaatgatcactctctcatgttctcgttggcaaacgtgctggggaaatcccagaaatacaaggaatctgaagctttattcctcaaggcaattaaagcaaatccaaatgctgcaagttaccatggtaatttggctgtgctttatcatcgttggggacatctagacttggccaagaaacactatgaaatctccttgcagcttgaccccacggcatcaggaactaaggagaattacggtctgctgagaaggaagctagaactaatgcaaaagaaagctgtcctcgag

SEQ ID NO: 134 - protein, 505 aa, Homo sapiens
EFKFNVLEIVQKVLHKDKSLENLGMLRNGGLLFRMTLLTSGGAGMLYVRWRIMGTGPPAFTEVDNPASFADSMLVRAVNYNYYYSLNAWLLLCPWWLCFDWSMGCIPLIKSISDWRVIALAALWFCLIGLICQALCSEDGHKRRILTLGLGFLVIPFLPASNLFFRVGFVVAERVLYLPSIGYCVLLTFGFGALSKHTKKKKLIAAVVLGILFINTLRCVLRSGEWRSEEQLFRSALSVCPLNAKVHYNIGKNLADKGNQTAAIRYYREAVRLNPKYVHAMNNLGNILKERNELQEAEELLSLAVQIQPDFAAAWMNLGIVQNSLKRFEAAEQSYRTAIKHRRKYPDCYYNLGRLYADLNRHVDALNAWRNATVLKPEHSLAWNNMIILLDNTGNLAQAEAVGREALELIPNDHSLMFSLANVLGKSQKYKESEALFLKAIKANPNAASYHGNLAVLYHRWGHLDLAKKHYEISLQLDPTASGTKENYGLLRRKLELMQKKAVLE

SEQ ID NO: 135 - DNA, 1515 bp, Homo sapiens
  CDS (1)..(1515)
gaattcaaattcaatgttctggaaattgtccagaaggtactacataaggacaagtcattagagaatctcggcatgctcaggaacggggacctcctcttcagaatgaccctgctcacctctggaggggctgggatgctctacgtgcgctggaggatcatgggcacgggcccgccggccttcaccgaggtggacaacccggcctcctttgctgacagcatgctggtgagggccgtaaactacaattactactattcattgaatgcctggctgctgctgtgtccctggtggctgtgttttgattggtcaatgggctgcatccccctcattaagtccatcagcgactggagggtaattgcacttgcagcactctggttctgcctaattggcctgatatgccaagccctgtgctctgaagacggccacaagagaaggatccttactctgggcctgggatttctcgttatcccatttctccccgcgagtaacctgttcttccgagtgggcttcgtggtcgcggagcgtgtcctctacctccccagcattgggtactgtgtgctgctgacttttggattcggagccctgagcaaacataccaagaaaaagaaactcattgccgctgtcgtgctgggaatcttattcatcaacacgctgagatgtgtgctgcgcagcggcgagtggcggagtgaggaacagcttttcagaagtgctctgtctgtgtgtcccctcaatgctaaggttcactacaacattggcaaaaacctggctgataaaggcaaccagacagctgccatcagatactaccgggaagctgtaagattaaatcccaagtatgttcatgccatgaataatcttggaaatatcttaaaagaaaggaatgagctacaggaagctgaggagctgctgtctttggctgttcaaatacagccagactttgccgctgcgtggatgaatctaggcatagtgcagaatagcctgaaacggtttgaagcagcagagcaaagttaccggacagcaattaaacacagaaggaaatacccagactgttactacaacctcgggcgtctgtatgcagatctcaatcgccacgtggatgccttgaatgcgtggagaaatgccaccgtgctgaaaccagagcacagcctggcctggaacaacatgattatactcctcgacaatacaggtaatttagcccaagctgaagcagttggaagagaggcactggaattaatacctaatgatcactctctcatgttctcgttggcaaacgtgctggggaaatcccagaaatacaaggaatctgaagctttattcctcaaggcaattaaagcaaatccaaatgctgcaagttaccatggtaatttggctgtgctttatcatcgttggggacatctagacttggccaagaaacactatgaaatctccttgcagcttgaccccacggcatcaggaactaaggagaattacggtctgctgagaagaaagctagaactaatgcaaaagaaagctgtcctcgag

SEQ ID NO: 136 - protein, 505 aa, Homo sapiens
EFKFNVLEIVQKVLHKDKSLENLGMLRNGDLLFRMTLLTSGGAGMLYVRWRIMGTGPPAFTEVDNPASFADSMLVRAVNYNYYYSLNAWLLLCPWWLCFDWSMGCIPLIKSISDWRVIALAALWFCLIGLICQALCSEDGHKRRILTLGLGFLVIPFLPASNLFFRVGFVVAERVLYLPSIGYCVLLTFGFGALSKHTKKKKLIAAVVLGILFINTLRCVLRSGEWRSEEQLFRSALSVCPLNAKVHYNIGKNLADKGNQTAAIRYYREAVRLNPKYVHAMNNLGNILKERNELQEAEELLSLAVQIQPDFAAAWMNLGIVQNSLKRFEAAEQSYRTAIKHRRKYPDCYYNLGRLYADLNRHVDALNAWRNATVLKPEHSLAWNNMIILLDNTGNLAQAEAVGREALELIPNDHSLMFSLANVLGKSQKYKESEALFLKAIKANPNAASYHGNLAVLYHRWGHLDLAKKHYEISLQLDPTASGTKENYGLLRRKLELMQKKAVLE

SEQ ID NO: 137 - DNA, 855 bp, Homo sapiens
  CDS (1)..(855)
gaattcagcggcgagtggcggagtgaggaacagcttttcagaagtgctctgtctgtgtgtcccctcaatgctaaggttcactacaacattggcaaaaacctggctgataaaggcagccagacagctgccatcagatactaccgggaagctgtaagattaaatcccaagtatgttcatgccatgaataatcttggaaatatcttaaaagaaaggaatgagctacaggaagctgaggagctgctgtctttggctgttcaaatacagccagactttgccgctgcgtggatgaatctaggcatagtgcagaatagcctgaaacggtttgaagcagcagagcaaagttatcggacagcaattaaacacagaaggaaatacccagactgttactacaacctcgggcgtctgtatgcagatctcaatcgccacgtggatgccttgaatgcgtggagaaatgccaccgtgctgaaaccagagcacagcctggcctggaacaacatgattatactcctcgacaatacaggtaatttagcccaagctgaagcagttggaagagaggcactggaattaatacctaatgatcactctctcatgttctcgttggcaaacgtgctggggaaatcccagaaatacaaggaatctgaagctttattcctcaaggcaattaaagcaaatccaaatgctgcaagttaccatggtaatttggctgtgctttatcatcgttggggacatctagacttggccaagaaacactatgaaatctccttgcagcttgaccccacggcatcaggaactaaggagaattacggtctgctgagaagaaagctagaactaatgcaaaagaaagctgtcctcgag

SEQ ID NO: 138 - protein, 285 aa, Homo sapiens
EFSGEWRSEEQLFRSALSVCPLNAKVHYNIGKNLADKGSQTAAIRYYREAVRLNPKYVHAMNNLGNILKERNELQEAEELLSLAVQIQPDFAAAWMNLGIVQNSLKRFEAAEQSYRTAIKHRRKYPDCYYNLGRLYADLNRHVDALNAWRNATVLKPEHSLAWNNMIILLDNTGNLAQAEAVGREALELIPNDHSLMFSLANVLGKSQKYKESEALFLKAIKANPNAASYHGNLAVLYHRWGHLDLAKKHYEISLQLDPTASGTKENYGLLRRKLELMQKKAVLE

SEQ ID NO: 139 - DNA, 855 bp, Homo sapiens
  CDS (1)..(855)
gaattcagcggcgagtggcggagtgaggaacagcttttcagaagtgctctgtctgtgtgtcccctcaatgctaaggttcaccacaacattggcaaaaacctggctgataaaggcaaccagacagctgccatcagatactaccgggaagctgtaagattaaatcccaagtatgttcatgccatgaataatcttggaaatatcttaaaagaaaggaatgagctacaggaagctgaggagctgctgtctttggctgttcaaatacagccagactttgccgctgcgtggatgaatctaggcatagtgcagaatagcctgaaacggtttgaagcagcagagcaaagttaccggacagcaattaaacacagaaggaaatacccagactgttactacaacctcgggcgtctgtatgcagatctcaatcgccacgtggatgccttgaatgcgtggagaaatgccaccgtgctgaaaccagagcacagcctggcctggaacaacatgattatactcctcgacaatacaggtaatttagcccaagctgaagcagttggaagagaggcactggaattaatacctaatgatcactctctcatgttctcgttggcaaacgtgctggggaaatcccagaaatacaaggaatctgaagctttattcctcaaggcaattaaagcaaatccaaatgctgcaagttaccatggtaatttggctgtgctttatcatcgttggggacatctagacttggccaagaaacactatgaaatctccttgcagcttgaccccacggcatcaggaactaaggagaattacggtctgctgagaagaaagctagaactaatgcaaaagaaagctgtcctcgag

SEQ ID NO: 140 - protein, 285 aa, Homo sapiens
EFSGEWRSEEQLFRSALSVCPLNAKVHHNIGKNLADKGNQTAAIRYYREAVRLNPKYVHAMNNLGNILKERNELQEAEELLSLAVQIQPDFAAAWMNLGIVQNSLKRFEAAEQSYRTAIKHRRKYPDCYYNLGRLYADLNRHVDALNAWRNATVLKPEHSLAWNNMIILLDNTGNLAQAEAVGREALELIPNDHSLMFSLANVLGKSQKYKESEALFLKAIKANPNAASYHGNLAVLYHRWGHLDLAKKHYEISLQLDPTASGTKENYGLLRRKLELMQKKAVLE

SEQ ID NO: 141 - DNA, 855 bp, Homo sapiens
  CDS (1)..(855)
gaattcagcggcgagtggcggagtgaggaacagcttttcagaagtgctctgtctgtgtgtcccctcaatgctaaggttcactacaacattggcaaaaacctggctgataaaggcaaccagacagccgccatcagatactaccgggaagctgtaagattaaatcccaagtatgttcatgccatgaataatcttggaaatatcttaaaagaaaggaatgagctacaggaagctgaggagctgctgtctttggctgttcaaatacagccagactttgccgctgcgtggatgaatctaggcatagtgcagaatagcctgaaacggtttgaagcagcagagcaaagttaccggacagcaattaaacacagaaggaaatacccagactgttactacaacctcgggcgtctgtatgcagatctcaatcgccacgtggatgccttgaatgcgtggagaaatgccaccgtgctgaaaccagagcacagcctggcctggaacaacatgattatactcctcgacaatacaggtaatttagcccaagctgaagcagttggaagagaggcactggaattaatacctaatgatcactctctcatgttctcgttggcaaacgtgctggggaaatcccagaaatacaaggaatctgaagctttattcctcaaggcaattaaagcaaatccaaatgctgcaagttaccatggtaatttggctgtgctttatcatcgttggggacatctagacttggccaagaaacactatgaaatctccttgcagcttgaccccacggcatcaggaactaaggagaattacggtctgctgagaagaaagctagaactaatgcaaaagaaagctgtcctcgag

SEQ ID NO: 142 - protein, 285 aa, Homo sapiens
EFSGEWRSEEQLFRSALSVCPLNAKVHYNIGKNLADKGNQTAAIRYYREAVRLNPKYVHAMNNLGNILKERNELQEAEELLSLAVQIQPDFAAAWMNLGIVQNSLKRFEAAEQSYRTAIKHRRKYPDCYYNLGRLYADLNRHVDALNAWRNATVLKPEHSLAWNNMIILLDNTGNLAQAEAVGREALELIPNDHSLMFSLANVLGKSQKYKESEALFLKAIKANPNAASYHGNLAVLYHRWGHLDLAKKHYEISLQLDPTASGTKENYGLLRRKLELMQKKAVLE

SEQ ID NO: 143 - DNA, 855 bp, Homo sapiens
  CDS (1)..(855)
gaattcagcggcgagtggcggagtgaggaacagcttttcagaagtgctctgtctgtgtgtcccctcaatgctaaggttcactacaacattggcaaaaacctggctgataaaggcaaccagacagctgccatcagatactaccgggaagctgtaagattaaatcccaagtatgttcatgccatgaataatcttggaaatatcttaaaagaaaggaatgagctacaggaagttgaggagctgctgtctttggctgttcaaatacagccagactttgccgctgcgtggatgaatctaggcatagtgcagaatagcctgaaacggtttgaagcagcagagcaaagttaccggacagcaattaaacacagaaggaaatacccagactgttactacaacctcgggcgtctgtatgcagatctcaatcgccacgtggatgccttgaatgcgtggagaaatgccaccgtgctgaaaccagagcacagcctggcctggaacaacatgattatactcctcgacaatacaggtaatttagcccaagctgaagcagttggaagagaggcactggaattaatacctaatgatcactctctcatgttctcgttggcaaacgtgctggggaaatcccagaaatacaaggaatctgaagctttattcctcaaggcaattaaagcaaatccaaatgctgcaagttaccatggtaatttggctgtgctttatcatcgttggggacatctagacttggccaagaaacactatgaaatctccttgcagcttgaccccacggcatcaggaactaaggagaattacggtctgctgagaagaaagctagaactaatgcaaaagaaagctgtcctcgag

SEQ ID NO: 144 - protein, 285 aa, Homo sapiens
EFSGEWRSEEQLFRSALSVCPLNAKVHYNIGKNLADKGNQTAAIRYYREAVRLNPKYVHAMNNLGNILKERNELQEVEELLSLAVQIQPDFAAAWMNLGIVQNSLKRFEAAEQSYRTAIKHRRKYPDCYYNLGRLYADLNRHVDALNAWRNATVLKPEHSLAWNNMIILLDNTGNLAQAEAVGREALELIPNDHSLMFSLANVLGKSQKYKESEALFLKAIKANPNAASYHGNLAVLYHRWGHLDLAKKHYEISLQLDPTASGTKENYGLLRRKLELMQKKAVLE

SEQ ID NO: 145 - DNA, 855 bp, Homo sapiens
  CDS (1)..(855)
gaattcagcggcgagtggcggagtgaggaacagcttttcagaagtgctctgtctgtgtgtcccctcaatgctaaggttcactacaacattggcaaaaacctggctgataaaggcaaccagacagctgccatcagatactaccgggaagctgtaagattaaatcccaagtatgttcatgccatgaataatcttggaaatatcttaaaagaaaggaatgagctacaggaagctgaggagctgctgtctttggctgttcaaatacagccagactttgccgctgcgtggatgaatctaggcatagtgcagaatagcctgaaacggtttgaagcagcagagcaaagttaccggacagcaattaaacacagaaggaaatacccagactgttactacaacctcgggcgtctgtatgcagatctcaatcgccacgtggatgccttgaatgcgtggagaaatgccaccgtgctgaaaccagagcacagcctggcctggaacaacatgattatactcctcgacaatacaggtaatttagcccaagctgaagcagttggaagagaggcactggaattaatacctaatgatcactctctcatgttctcgttggcaaacgtgctggggaaatcccagaaatacaaggaatctgaagctttatccctcaaggcaattaaagcaaatccaaatgctgcaagttaccatggtaatttggctgtgctttatcatcgttggggacatctagacttggccaagaaacactatgaaatctccttgcagcttgaccccacggcatcaggaactaaggagaattacggtctgctgagaagaaagctagaactaatgcaaaagaaagctgtcctcgag

SEQ ID NO: 146 - protein, 285 aa, Homo sapiens
EFSGEWRSEEQLFRSALSVCPLNAKVHYNIGKNLADKGNQTAAIRYYREAVRLNPKYVHAMNNLGNILKERNELQEAEELLSLAVQIQPDFAAAWMNLGIVQNSLKRFEAAEQSYRTAIKHRRKYPDCYYNLGRLYADLNRHVDALNAWRNATVLKPEHSLAWNNMIILLDNTGNLAQAEAVGREALELIPNDHSLMFSLANVLGKSQKYKESEALSLKAIKANPNAASYHGNLAVLYHRWGHLDLAKKHYEISLQLDPTASGTKENYGLLRRKLELMQKKAVLE

SEQ ID NO: 147 - DNA, 855 bp, Homo sapiens
  CDS (1)..(855)
gaattcagcggcgagtggcggagtgaggaacagcttttcagaagtgctctgtctgtgtgtcccctcaatgctaaggttcactacaacattggcaaaaacctggctgataaaggcaaccagacagctgccatcagatactaccgggaagctgtaagattaaatcccaagtatgttcatgccatgaataatcttggaaatatcttaaaagaaaggaatgagctacaggaagctgaggagctgctgtctttggctgttcaaatacagccagactttgccgctgcgtggatgaatctaggcatagtgcagaatagcctgaaacggtttgaagcagcagagcaaagttaccggacagcaattaaacacagaaggaaatacccagactgttactacaacctcgggcgtctgtatgcagatctcaatcgccacgtggatgccttgaatgcgtggagaaatgccaccgtgctgaaaccagagcacagcctggcctggaacaacatgattatactcctcgacaatacaggtaatttagcccaagctgaagcagttggaagagaggcactggaattaatacctaatgatcactctctcatgttctcgttggcaaacgtgctggggaaatcccagaaatacaaggaatctgaagctttattcctcaaggcaattaaagcaaatccaaatgctgcaagttaccatggtaatttggctgtgctttatcatcgttggggacatctagacttggccaagaaacaccatgaaatctccttgcagcttgaccccacggcatcaggaactaaggagaattacggtctgctgagaagaaagctagaactaatgcaaaagaaagctgtcctcgag

SEQ ID NO: 148 - protein, 285 aa, Homo sapiens
EFSGEWRSEEQLFRSALSVCPLNAKVHYNIGKNLADKGNQTAAIRYYREAVRLNPKYVHAMNNLGNILKERNELQEAEELLSLAVQIQPDFAAAWMNLGIVQNSLKRFEAAEQSYRTAIKHRRKYPDCYYNLGRLYADLNRHVDALNAWRNATVLKPEHSLAWNNMIILLDNTGNLAQAEAVGREALELIPNDHSLMFSLANVLGKSQKYKESEALFLKAIKANPNAASYHGNLAVLYHRWGHLDLAKKHHEISLQLDPTASGTKENYGLLRRKLELMQKKAVLE

SEQ ID NO: 149 - DNA, 855 bp, Homo sapiens
  CDS (1)..(855)
gaattcagcggcgagtggcggagtgaggaacagcttttcagaagtgctctgtctgtgtgtcccctcaatgctaaggttcactacaacattggcaaaaacctggctgataaaggcaaccagacagctgccatcagatactaccgggaagctgtaagattaaatcccaagtatgttcatgccatgaataatcttggaaatatcttaaaagaaaggaatgagctacaggaagctgaggagctgctgtctttggctgttcaaatacagccagactttgccgctgcgtggatgaatctaggcatagtgcagaatagcctgaaacggtttgaagcagcagagcaaagttaccggacagcaattaaacacagaaggaaatacccagactgttactacaacctcgggcgtctgtatgcagatctcaatcgccacgtggatgccttgaatgcgtggagaaatgccaccgtgctgaaaccagagcacagcctggcctggaacaacatgattatactcctcgacaatacaggtaatttagcccaagctgaagcagttggaagagaggcactggaattaatacctaatgatcactctctcatgttctcgttggcaaacgtgctggggaaatcccagaaatacagggaatctgaagctttattcctcaaggcaattaaagcaaatccaaatgctgcaagttaccatggtaatttggctgtgctttatcatcgttggggacatctagacttggccaagaaacactatgaaatctccttgcagcttgaccccacggcatcaggaactaaggagaattacggtctgctgagaagaaagctagaactaatgcaaaagaaagctgtcctcgag

SEQ ID NO: 150 - protein, 285 aa, Homo sapiens
EFSGEWRSEEQLFRSALSVCPLNAKVHYNIGKNLADKGNQTAAIRYYREAVRLNPKYVHAMNNLGNILKERNELQEAEELLSLAVQIQPDFAAAWMNLGIVQNSLKRFEAAEQSYRTAIKHRRKYPDCYYNLGRLYADLNRHVDALNAWRNATVLKPEHSLAWNNMIILLDNTGNLAQAEAVGREALELIPNDHSLMFSLANVLGKSQKYRESEALFLKAIKANPNAASYHGNLAVLYHRWGHLDLAKKHYEISLQLDPTASGTKENYGLLRRKLELMQKKAVLE

SEQ ID NO: 151 - DNA, 1515 bp, Homo sapiens; identical to SEQ ID NO: 135
  CDS (1)..(1515)

SEQ ID NO: 152 - protein, 505 aa, Homo sapiens; identical to SEQ ID NO: 136

SEQ ID NO: 153 - DNA, 843 bp, Homo sapiens
  CDS (1)..(843)
agcggcgagtggcggagtgaggaacagcttttcagaagtgctctgtctgtgtgtcccctcaatgctaaggttcactacaacattggcaaaaacctggctgataaaggcaaccagacagctgccatcagatactaccgggaagctgtaagattaaatcccaagtatgttcatgccatgaataatcttggaaatatcttaaaagaaaggaatgagctacaggaagctgaggagctgctgtctttggctgttcaaatacagccagactttgccgctgcgtggatgaatctaggcatagtgcagaatagcctgaaacggtttgaagcagcagagcaaagttaccggacagcaattaaacacagaaggaaatacccagactgttactacaacctcgggcgtctgtatgcagatctcaatcgccacgtggatgccttgaatgcgtggagaaatgccaccgtgctgaaaccagagcacagcctggcctggaacaacatgattatactcctcgacaatacaggtaatttagcccaagctgaagcagttggaagagaggcactggaattaatacctaatgatcactctctcatgttctcgttggcaaacgtgctggggaaatcccagaaatacaaggaatctgaagctttattcctcaaggcaattaaagcaaatccaaatgctgcaagttaccatggtaatttggctgtgctttatcatcgttggggacatctagacttggccaagaaacactatgaaatctccttgcagcttgaccccacggcatcaggaactaaggagaattacggtctgctgagaagaaagctagaactaatgcaaaagaaagctgtc

SEQ ID NO: 154 - protein, 281 aa, Homo sapiens
SGEWRSEEQLFRSALSVCPLNAKVHYNIGKNLADKGNQTAAIRYYREAVRLNPKYVHAMNNLGNILKERNELQEAEELLSLAVQIQPDFAAAWMNLGIVQNSLKRFEAAEQSYRTAIKHRRKYPDCYYNLGRLYADLNRHVDALNAWRNATVLKPEHSLAWNNMIILLDNTGNLAQAEAVGREALELIPNDHSLMFSLANVLGKSQKYKESEALFLKAIKANPNAASYHGNLAVLYHRWGHLDLAKKHYEISLQLDPTASGTKENYGLLRRKLELMQKKAV

SEQ ID NO: 155 - DNA, 1503 bp, Homo sapiens
  CDS (1)..(1503)
aaattcaatgttctggaaattgtccagaaggtactacataaggacaagtcattagagaatctcggcatgctcaggaacgggggcctcctcttcagaatgaccctgctcacctctggaggggctgggatgctctacgtgcgctggaggatcatgggcacgggcccgccggccttcaccgaggtggacaacccggcctcctttgctgacagcatgctggtgagggccgtaaactacaattactactattcattgaatgcctggctgctgctgtgtccctggtggctgtgttttgattggtcaatgggctgcatccccctcattaagtccatcagcgactggagggtaattgcacttgcagcactctggttctgcctaattggcctgatatgccaagccctgtgctctgaagacggccacaagagaaggatccttactctgggcctgggatttctcgttatcccatttctccctgcgagtaacctgttcttccgagtgggcttcgtggtcgcggagcgtgtcctctacctccccagcgttgggtactgtgtgctgctgacttttggattcggagccctgagcaaacataccaagaaaaagaaactcattgccgctgtcgtgctgggaatcttattcatcaacacgctgagatgtgtgctgcgcagcggcgagtggcggagtgaggaacagcttttcagaagtgctctgtctgtgtgtcccctcaatgctaaggttcactacaacattggcaaaaacctggctgataaaggcaaccagacagctgccatcagatactaccgggaagctgtaagattaaatcccaagtatgttcatgccatgaataatcttggaaatatcttaaaagaaaggaatgagctacaggaagctgaggagctgctgtctttggctgttcaaatacagccagactttgccgctgcgtggatgaatctaggcatagtgcagaatagcctgaaacggtttgaagcagcagagcaaagttaccggacagcaattaaacacagaaggaaatacccagactgttactacaacctcgggcgtctgtatgcagatctcaatcgccacgtggatgccttgaatgcgtggagaaatgccaccgtgctgaaaccagagcacagcctggcctggaacaacatgattatactcctcgacaatacaggtaatttagcccaagctgaagcagttggaagagaggcactggaattaatacctaatgatcactctctcatgttctcgttggcaaacgtgctggggaaatcccagaaatacaaggaatctgaagctttattcctcaaggcaattaaagcaaatccaaatgctgcaagttaccatggtaatttggctgtgctttatcatcgttggggacatctagacttggccaagaaacactatgaaatctccttgcagcttgaccccacggcatcaggaactaaggagaattacggtctgctgagaagaaagctagaactaatgcaaaagaaagctgtc

SEQ ID NO: 156 - protein, 501 aa, Homo sapiens
KFNVLEIVQKVLHKDKSLENLGMLRNGGLLFRMTLLTSGGAGMLYVRWRIMGTGPPAFTEVDNPASFADSMLVRAVNYNYYYSLNAWLLLCPWWLCFDWSMGCIPLIKSISDWRVIALAALWFCLIGLICQALCSEDGHKRRILTLGLGFLVIPFLPASNLFFRVGFVVAERVLYLPSVGYCVLLTFGFGALSKHTKKKKLIAAVVLGILFINTLRCVLRSGEWRSEEQLFRSALSVCPLNAKVHYNIGKNLADKGNQTAAIRYYREAVRLNPKYVHAMNNLGNILKERNELQEAEELLSLAVQIQPDFAAAWMNLGIVQNSLKRFEAAEQSYRTAIKHRRKYPDCYYNLGRLYADLNRHVDALNAWRNATVLKPEHSLAWNNMIILLDNTGNLAQAEAVGREALELIPNDHSLMFSLANVLGKSQKYKESEALFLKAIKANPNAASYHGNLAVLYHRWGHLDLAKKHYEISLQLDPTASGTKENYGLLRRKLELMQKKAV

SEQ ID NO: 157 - DNA, 1515 bp, Homo sapiens; identical to SEQ ID NO: 115
  CDS (7)..(1509)

SEQ ID NO: 158 - protein, 501 aa, Homo sapiens; identical to SEQ ID NO: 156

SEQ ID NO: 159 - DNA, 1515 bp, Homo sapiens; identical to SEQ ID NO: 117
  CDS (7)..(1509)

SEQ ID NO: 160 - protein, 501 aa, Homo sapiens
KFNVLEIVQKVLHKDKSLENLGMLRNGGLLFRMTLLTSGGAGMLYVRWRIMGTGPPAFTEVDNPASFADSMLVRAVNYNYYYSLNAWLLLCPWWLCFDWSMGCTPLIKSISDWRVIALAALWFCLIGLICQALCSEDGHKRRILTLGLGFLVIPFLPASNLFFRVGFVVAERVLYLPSVGYCVLLTFGFGALSKHTKKKKLIAAVVLGILFINTLRCVLRSGEWRSEEQLFRSALSVCPLNAKVHYNIGKNLADKGNQTAAIRYYREAVRLNPKYVHAMNNLGNILKERNELQEAEELLSLAVQIQPDFAAAWMNLGIVQNSLKRFEAAEQSYRTAIKHRRKYPDCYYNLGRLYADLNRHVDALNAWRNATVLKPEHSLAWNNMIILLDNTGNLAQAEAVGREALELIPNDHSLMFSLANVLGKSQKYKESEALFLKAIKANPNAASYHGNLAVLYHRWGHLDLAKKHYEISLQLDPTASGTKENYGLLRRKLELMQKKAV

SEQ ID NO: 161 - DNA, 855 bp, Homo sapiens
  CDS (7)..(849)
gaattcagcggcgagtggcggagtgaggaacagcttttcagaagtgctctgtctgtgtgtcccctcaatgctaaggttcactacaacattggcaaaaacctggctgataaaggcaaccagacagctgccatcagatactaccgggaagctgtaagattaaatcccaagtatgttcatgccatgaataatcttggaaatatcttaaaagaaaggaatgagctacaggaagctgaggagctgctgtctttggctgttcaaatacagccagactttgccgctgcgtggatgaatctaggcatagtgcagaatagcctgaaacggtttgaagcagcagagcaaagttaccggacagcaattaaacacagaaggaaatacccagactgttactacaacctcgggcgtctgtatgcagatctcaatcgccacgtggatgccttgaatgcgtggagaaatgccaccgtgctgaaaccagagcacagcctggcctggaacaacatgattatactcctcgacaatacaggtaatttagcccaagctgaagcagttggaagagaggcactggaattaatacctaatgatcactctctcatgttctcgttggcaaacgtgctggggaaatcccagaaatacaaggaatctgaagctttattcctcaaggcaattaaagcaaatccaaatgctgcaagttaccatggtaatttggctgtgctttatcatcgttggggacatctagacttggccaagaaacactatgaaatctccttgcagcttgaccccacggcatcaggaactaaggagaattacggtctgctgagaagaaagctagaactaatgcaaaagaaagctgtcctcgag

SEQ ID NO: 162 - protein, 281 aa, Homo sapiens; identical to SEQ ID NO: 154

SEQ ID NO: 163 - DNA, 855 bp, Homo sapiens; identical to SEQ ID NO: 137
  CDS (7)..(849)

SEQ ID NO: 164 - protein, 281 aa, Homo sapiens
SGEWRSEEQLFRSALSVCPLNAKVHYNIGKNLADKGSQTAAIRYYREAVRLNPKYVHAMNNLGNILKERNELQEAEELLSLAVQIQPDFAAAWMNLGIVQNSLKRFEAAEQSYRTAIKHRRKYPDCYYNLGRLYADLNRHVDALNAWRNATVLKPEHSLAWNNMIILLDNTGNLAQAEAVGREALELIPNDHSLMFSLANVLGKSQKYKESEALFLKAIKANPNAASYHGNLAVLYHRWGHLDLAKKHYEISLQLDPTASGTKENYGLLRRKLELMQKKAV

SEQ ID NO: 165 - DNA, 855 bp, Homo sapiens; identical to SEQ ID NO: 139
  CDS (7)..(849)

SEQ ID NO: 166 - protein, 281 aa, Homo sapiens
SGEWRSEEQLFRSALSVCPLNAKVHHNIGKNLADKGNQTAAIRYYREAVRLNPKYVHAMNNLGNILKERNELQEAEELLSLAVQIQPDFAAAWMNLGIVQNSLKRFEAAEQSYRTAIKHRRKYPDCYYNLGRLYADLNRHVDALNAWRNATVLKPEHSLAWNNMIILLDNTGNLAQAEAVGREALELIPNDHSLMFSLANVLGKSQKYKESEALFLKAIKANPNAASYHGNLAVLYHRWGHLDLAKKHYEISLQLDPTASGTKENYGLLRRKLELMQKKAV

SEQ ID NO: 167 - DNA, 855 bp, Homo sapiens; identical to SEQ ID NO: 141
  CDS (7)..(849)

SEQ ID NO: 168 - protein, 281 aa, Homo sapiens; identical to SEQ ID NO: 154

SEQ ID NO: 169 - DNA, 855 bp, Homo sapiens; identical to SEQ ID NO: 143
  CDS (7)..(849)

SEQ ID NO: 170 - protein, 281 aa, Homo sapiens
SGEWRSEEQLFRSALSVCPLNAKVHYNIGKNLADKGNQTAAIRYYREAVRLNPKYVHAMNNLGNILKERNELQEVEELLSLAVQIQPDFAAAWMNLGIVQNSLKRFEAAEQSYRTAIKHRRKYPDCYYNLGRLYADLNRHVDALNAWRNATVLKPEHSLAWNNMIILLDNTGNLAQAEAVGREALELIPNDHSLMFSLANVLGKSQKYKESEALFLKAIKANPNAASYHGNLAVLYHRWGHLDLAKKHYEISLQLDPTASGTKENYGLLRRKLELMQKKAV

SEQ ID NO: 171 - DNA, 855 bp, Homo sapiens; identical to SEQ ID NO: 145
  CDS (7)..(849)

SEQ ID NO: 172 - protein, 281 aa, Homo sapiens
SGEWRSEEQLFRSALSVCPLNAKVHYNIGKNLADKGNQTAAIRYYREAVRLNPKYVHAMNNLGNILKERNELQEAEELLSLAVQIQPDFAAAWMNLGIVQNSLKRFEAAEQSYRTAIKHRRKYPDCYYNLGRLYADLNRHVDALNAWRNATVLKPEHSLAWNNMIILLDNTGNLAQAEAVGREALELIPNDHSLMFSLANVLGKSQKYKESEALSLKAIKANPNAASYHGNLAVLYHRWGHLDLAKKHYEISLQLDPTASGTKENYGLLRRKLELMQKKAV

SEQ ID NO: 173 - DNA, 855 bp, Homo sapiens; identical to SEQ ID NO: 147
  CDS (7)..(849)

SEQ ID NO: 174 - protein, 281 aa, Homo sapiens
SGEWRSEEQLFRSALSVCPLNAKVHYNIGKNLADKGNQTAAIRYYREAVRLNPKYVHAMNNLGNILKERNELQEAEELLSLAVQIQPDFAAAWMNLGIVQNSLKRFEAAEQSYRTAIKHRRKYPDCYYNLGRLYADLNRHVDALNAWRNATVLKPEHSLAWNNMIILLDNTGNLAQAEAVGREALELIPNDHSLMFSLANVLGKSQKYKESEALFLKAIKANPNAASYHGNLAVLYHRWGHLDLAKKHHEISLQLDPTASGTKENYGLLRRKLELMQKKAV

SEQ ID NO: 175 - DNA, 855 bp, Homo sapiens; identical to SEQ ID NO: 149
  CDS (7)..(849)

SEQ ID NO: 176 - protein, 281 aa, Homo sapiens
SGEWRSEEQLFRSALSVCPLNAKVHYNIGKNLADKGNQTAAIRYYREAVRLNPKYVHAMNNLGNILKERNELQEAEELLSLAVQIQPDFAAAWMNLGIVQNSLKRFEAAEQSYRTAIKHRRKYPDCYYNLGRLYADLNRHVDALNAWRNATVLKPEHSLAWNNMIILLDNTGNLAQAEAVGREALELIPNDHSLMFSLANVLGKSQKYRESEALFLKAIKANPNAASYHGNLAVLYHRWGHLDLAKKHYEISLQLDPTASGTKENYGLLRRKLELMQKKAV

SEQ ID NO: 177 - DNA, 2107 bp, Homo sapiens
  CDS (557)..(1825)
gcctttttttttttttttttttttttttttttaagagacagaatctcgctctgccacccaggccggagtgcagtggcgcgatcacagctcactgcagccttgacctcccgggctcaagtgatcttcccgcctcagattccggagcagctaggaccccagacagcaccaccacacctggcttcacaggccttgccgtccgctgctagctgatagcccacgtggcactcacagcgggcgaggccccggaccacctggcacctgtgcatgcagctgccgttcctgttggcacacgggcttctacggacacaatgcctgccgtcctcctggagctggaacccgggccggcactggcagcgatgccgagtgattgtgagctggacacagtggtgctggcagccgccattgcccagggcgcaggagttaatggccaggcaggtcctgctgtcagggaattcagcggccgctgaattctagctagaattcagcggccgctgaattctagcagacggctttggaatccaccagctacatccagctccctgaggcagagttgagaatggagagaatgttacctctcctggctctggggctcttggcggctgggttctgccctgctgtcctctgccaccctaacagcccacttgacgaggagaatctgacccaggagaaccaagaccgagggacacacgtggacctcggattagcctccgccaacgtggacttcgctttcagcctgtacaagcagttagtcctgaaggcccctgataagaatgtcatcttctccccactgagcatctccaccgccttggccttcctgtctctgggggcccataataccaccctgacagagattctcaaaggcctcaagttcaacctcacggagacttctgaggcagaaattcaccaaaccttccagcacctcctgcgcactctcaatcagtccagcgatgagctgcagctgagtatgggaaatgccatgtttgtcaaagagcaactcagtctgctggacaggttcacggaggatgccaagaggctgtatggctccgaggcctttgccactgactttcaggactcagctgcagctaagaagctcatcaacgactacgtgaagaatggaactagggggaaaatcacagatctgatcaaggaccttgactcgcagacaatgatggtcctggtgaattacatcttctttaaagccaaatgggagatgccctttgacccccaagatactcatcagtcaaggttctacttgagcaagaaaaagtgggtaatggtgcccatgatgagtttgcatcacctgactataccttacttccgggacgaggagctgtcctgcaccgtggtggagctgaagtacacaggcaatgccagcgcactcttcatcctccctgatcaagacaagatggaggaagtggaagccatgctgctcccagagaccctgaagcggtggagagactctctggagttcagagagataggtgagctctacctgccaaagttttccatctcgagggactataacctgaacgacatacttctccagctgggcattgaggaagccttcaccagcaaggctgacctgtcagggatcacaggggccaggaacctagcagtctcccaggtggtccataaggctgtgcttgatgtatttgaggagggcacagaagcatctgctgccacagcagtcaaaatcaccctcctttctgcattagtggagacaaggaccattgtgcgtttcaacaggcccttcctgatgatcattgtccctacagacacccagaacatcttcttcatgagcaaagtcaccaatcccaagcaagcctagagcttgccatcaagcagtggggctctcagtaaggaacttggaatgcaagctggatgcctgggtctctgggcacagcctggcccctgtgcaccgagtggccatggcatgtgtggccctgtctgcttatccttggaaggtgacagcgattccctgtgtagctctcacatgcacaggggcccatggactcttcagtctggagggtcctgggcctcctgacagcaataaataatttcgttggaagggcgattccagcacacttgtgggcgacaataagtttaa

SEQ ID NO: 178 - protein, 423 aa, Homo sapiens
MERMLPLLALGLLAAGFCPAVLCHPNSPLDEENLTQENQDRGTHVDLGLASANVDFAFSLYKQLVLKAPDKNVIFSPLSISTALAFLSLGAHNTTLTEILKGLKFNLTETSEAEIHQTFQHLLRTLNQSSDELQLSMGNAMFVKEQLSLLDRFTEDAKRLYGSEAFATDFQDSAAAKKLINDYVKNGTRGKITDLIKDLDSQTMMVLVNYIFFKAKWEMPFDPQDTHQSRFYLSKKKWVMVPMMSLHHLTIPYFRDEELSCTVVELKYTGNASALFILPDQDKMEEVEAMLLPETLKRWRDSLEFREIGELYLPKFSISRDYNLNDILLQLGIEEAFTSKADLSGITGARNLAVSQVVHKAVLDVFEEGTEASAATAVKITLLSALVETRTIVRFNRPFLMIIVPTDTQNIFFMSKVTNPKQA

SEQ ID NO: 179 - DNA, 1281 bp, Homo sapiens
  CDS (64)..(1197)
tactccagacagacggctttggaatccaccagctacatccagctccctgaggcagagttgagaatggagagaatgttacctctcctgactctggggctcttggcggctgggttctgccctgctgtcctctgccaccctaacagcccacttgacgaggagaatctgacccaggagaaccaagaccgagggacacacgtggacctcggattagcctccgccaacgtggacttcgctttcagcctgtacaagcagttagtcctgaaggcccctgataagaatgtcatcttctccccactgagcatctccaccgccttggccttcctgtctctgggggcccataataccaccctgacagagattctcaaaggcctcaagttcaacctcacggagacttctgaggcagaaattcaccagagcttccagcacctcctgcgcaccctcaatcagtccagcgatgagctgcagctgagtatgggaaatgccatgtttgtcaaagagcaactcagtctgctggacaggttcacggaggatgccaagaggctgtatggctccgaggcctttgccactgactttcaggactcagctgcagctaagaagctcatcaacgactacgtgaagaatggaactagggggaaaatcacagatctgatcaaggaccttgactcgcagacaatgatggtcctggtgaattacatcttctttaaagccaaatgggagatgccctttgacccccaagatactcatcagtcaaggttctacttgagcaagaaaaagtgggtaatggtgcccatgatgagtttgcatcacctgactataccttacttccgggacgaggagctgtcctgcaccgtggtggagctgaagtacacaggcaatgccagcgcactcttcatcctccctgatcaagacaagatggaggaagtggaagccatgctgctcccagagaccctgaagcggtggagagactctctggagttcagagagataggtgagctctacctgccaaagttttccatctcgagggactataacctgaacgacatacttctccagctgggcattgaggaagccttcaccagcaaggctgacctgtcaaggaccattgtgcgtttcaacaggcccttcctgatgatcattgtccctacagacacccagaacatcttcttcatgagcaaagtcaccaatcccaagcaagcctagagcttgccatcaagcagtggggctctcagtaaggaacttggaattcaaactggattcctgggtctctgggcacaacctggc

SEQ ID NO: 180 - protein, 378 aa, Homo sapiens
MERMLPLLTLGLLAAGFCPAVLCHPNSPLDEENLTQENQDRGTHVDLGLASANVDFAFSLYKQLVLKAPDKNVIFSPLSISTALAFLSLGAHNTTLTEILKGLKFNLTETSEAEIHQSFQHLLRTLNQSSDELQLSMGNAMFVKEQLSLLDRFTEDAKRLYGSEAFATDFQDSAAAKKLINDYVKNGTRGKITDLIKDLDSQTMMVLVNYIFFKAKWEMPFDPQDTHQSRFYLSKKKWVMVPMMSLHHLTIPYFRDEELSCTVVELKYTGNASALFILPDQDKMEEVEAMLLPETLKRWRDSLEFREIGELYLPKFSISRDYNLNDILLQLGIEEAFTSKADLSRTIVRFNRPFLMIIVPTDTQNIFFMSKVTNPKQA

SEQ ID NO: 181 - DNA, 1282 bp, Homo sapiens
  CDS (49)..(696)
gctttggaatccaccagctacatccagctccctgaggcagagttgagaatggagagaatgttacctctcctgactctggggctcttggcggctgggttctgccctgctgtcctctgccaccctaacagcccacttgacgaggagaatctgacccaggagaaccaagaccgagggacacacgtggacctcggattagcctccgccaacgtggacttcgctttcagcctgtacaagcagttagtcctgaaggcccctgataagaatgtcatcttctccccactgagcatctccaccgccttggccttcctgtctctgggggcccataataccaccctgacagagattctcaaaggcctcaagttcaacctcacggagacttctgaggcagaaattcaccaaaccttccaccacctcctgcgcaccctcaatcagtccagcgatgagctgcagctgagtatgggaaatgccatgtttgtcaaagagcaactcagtctgctggacaggttcacggaggatgccaagaggctgtatggctccgaggcctttgccactgactttcaggactcagctgcagctaagaagctcatcaacgactacgtgaagaatggaactagggggaaaatcacagatctgatcaaggaccttgactcgcagacaatgatggtcctggtgaattacatcttctttaaagagagataggtgagctctacctgccaaagttttccatctcgagggactataacctgaacgacatacttctccagctgggcattgaggaagccttcaccagcaaggctgacctgtcagggatcacaggggccaggaacctagcagtctcccaggtggtccataaggctgtgcttgatgtatttgaggagggcacagaagcatctgctgccacagcagtcaaaatcaccctcctttctgcattagtggagacaaggaccattgtgcgtttcaacaggcccttcctgatgatcattgtccctacagacacccagaacatcttcttcatgagcaaagtcaccaatcccaagcaagcctagagcttgccatcaagcagtggggctctcagtaaggaacttggaatgcaagctggatgcctgggtctctgggcacagcctggcccctgtgcaccgagtgtccatggcatgtatggccctgtctgcttatccttggaagatgacagcgaatccctgtgaagctctcacatgcacaggggcccatggactcttcattctggagggtcctgggcctcctgacagcaacaaataatatcgtt

SEQ ID NO: 182 - protein, 216 aa, Homo sapiens
MERMLPLLTLGLLAAGFCPAVLCHPNSPLDEENLTQENQDRGTHVDLGLASANVDFAFSLYKQLVLKAPDKNVIFSPLSISTALAFLSLGAHNTTLTEILKGLKFNLTETSEAEIHQTFHHLLRTLNQSSDELQLSMGNAMFVKEQLSLLDRFTEDAKRLYGSEAFATDFQDSAAAKKLINDYVKNGTRGKITDLIKDLDSQTMMVLVNYIFFKER

SEQ ID NO: 183 - DNA, 667 bp, Homo sapiens
  CDS (2)..(667)
caccaagcttatggagagaatgttacctctcctgactctggggctcttggcggctgggttctgccctgctgtcctctgccaccctaacagcccacttgacgaggagaatctgacccaggagaaccaagaccgagggacacacgtggacctcggattagcctccgccaacgtggacttcgctttcagcctgtacaagcagttagtcctgaaggcccctgataagaatgtcatcttctccccactgagcatctccaccgccttggccttcctgtctctgggggcccataataccaccctgacagagattctcaaaggcctcaagttcaacctcacggagacttctgaggcagaaattcaccagagcttccagcacctcctgcgcaccctcaatcagtccagcgatgagctgcagctgagtatgggaaatgccatgtttgtcaaagagcaactcagtctgctggacaggttcacggaggatgccaagaggctgtatggctccgaggcctttgccactgactttcaggactcagctgcagctaagaagctcatcaacgactacgtgaagaatggaactagggggaaaatcacagatctgatcaaggaccttgactcgcagacaatgatggtcctggtgaattacatcttctttaaagagagagtcgacggc

SEQ ID NO: 184 - protein, 222 aa, Homo sapiens
TKLMERMLPLLTLGLLAAGFCPAVLCHPNSPLDEENLTQENQDRGTHVDLGLASANVDFAFSLYKQLVLKAPDKNVIFSPLSISTALAFLSLGAHNTTLTEILKGLKFNLTETSEAEIHQSFQHLLRTLNQSSDELQLSMGNAMFVKEQLSLLDRFTEDAKRLYGSEAFATDFQDSAAAKKLINDYVKNGTRGKITDLIKDLDSQTMMVLVNYIFFKERVDG

SEQ ID NO: 185 - DNA, 1603 bp, Homo sapiens
  CDS (2)..(1321)
gacggctttggaatccaccagctacatccagctccctgaggcagagttgagaatggagagaatgttacctctcctggctctggggctcttggcggctgggttctgccctgctgtcctctgccaccctaacagcccacttgacgaggagaatctgacccaggagaaccaagaccgagggacacacgtggacctcggattagcctccgccaacgtggacttcgctttcagcctgtacaagcagttagtcctgaaggcccctgataagaatgtcatcttctccccactgagcatctccaccgccttggccttcctgtctctgggggcccataataccaccctgacagagattctcaaaggcctcaagttcaacctcacggagacttctgaggcagaaattcaccagagcttccagcacctcctgcgcaccctcaatcagtccagcgatgagctgcagctgagtatgggaaatgccatgtttgtcaaagagcaactcagtctgctggacaggttcacggaggatgccaagaggctgtatggctccgaggcctttgccactgactttcaggactcagctgcagctaagaagctcatcaacgactacgtgaagaatggaactagggggaaaatcacagatctgatcaaggaccttgactcgcagacaatgatggtcctggtgaattacatcttctttaaagccaaatgggagatgccctttgacccccaagatactcatcagtcaaggttctacttgagcaagaaaaagtgggtaatggtgcccatgatgagtttgcatcacctgactataccttacttccgggacgaggagctgtcctgcaccgtggtggagctgaagtacacaggcaatgccagcgcactcttcatcctccctgatcaagacaagatggaggaagtggaagccatgctgctcccagagaccctgaagcggtggagagactctctggagttcagagagataggtgagctctacctgccaaagttttccatctcgagggactataacctgaacgacatacttctccagctgggcattgaggaagccttcaccagcaaggctgacctgtcagggatcacaggggccaggaacctagcagtctcccaggtggtccataaggctgtgcttgatgtatttgaggagggcacagaagcatctgctgccacagcagtcaaaatcaccctcctttctgcattagtggagacaaggaccattgtgcgtttcaacaggcccttcctgatgatcattgtccctacagacacccagaacatcttcttcatgagcaaagtcaccaatcccaagcaagcctagagcttgccatcaagcagtggggctctcagtaaggaacttggaatgcaagctggatgcctgggtctctgggcacagcctggcccctgtgcaccgagtggccatggcatgtgtggccctgtctgcttatccttggaaggtgacagcgattccctgtgtagctctcacatgcacaggggcccatggactcttcagtctggagggtcctgggcctcctgacagcaataaataatttcgttggaaaaaaaaaaaaaaaaaaaaaaaaaaaaaaaaaaaaaaaac

SEQ ID NO: 186 - protein, 440 aa, Homo sapiens
TALESTSYIQLPEAELRMERMLPLLALGLLAAGFCPAVLCHPNSPLDEENLTQENQDRGTHVDLGLASANVDFAFSLYKQLVLKAPDKNVIFSPLSISTALAFLSLGAHNTTLTEILKGLKFNLTETSEAEIHQSFQHLLRTLNQSSDELQLSMGNAMFVKEQLSLLDRFTEDAKRLYGSEAFATDFQDSAAAKKLINDYVKNGTRGKITDLIKDLDSQTMMVLVNYIFFKAKWEMPFDPQDTHQSRFYLSKKKWVMVPMMSLHHLTIPYFRDEELSCTVVELKYTGNASALFILPDQDKMEEVEAMLLPETLKRWRDSLEFREIGELYLPKFSISRDYNLNDILLQLGIEEAFTSKADLSGITGARNLAVSQVVHKAVLDVFEEGTEASAATAVKITLLSALVETRTIVRFNRPFLMIIVPTDTQNIFFMSKVTNPKQA

SEQ ID NO: 187 - DNA, 1860 bp, Homo sapiens
  CDS (154)..(1368)
gcggatcctcacacgactgtgatccgattctttccagcggcttctgcaaccaagcgggtcttacccccggtcctccgcgtctccagtcctcgcacctggaaccccaacgtccccgagagtccccgaatccccgctcccaggctacctaagaggatgagcggtgctccgacggccggggcagccctgatgctctgcgccgccaccgccgtgctactgagcgctcagggcggacccgtgcagtccaagtcgccgcgctttgcgtcctgggacgagatgaatgtcctggcgcacggactcctgcagctcggccaggggtgcgcgaacaccggagcgcacccgcagtcagctgagcgcgctggagcgcgcctgagcgcgtgcgggtccgcctgtcagggaaccgaggggtccaccgacctcccgttagcccctgagagccgggtggaccctgaggtccttcacagcctgcagacacaactcaaggctcagaacagcaggatccagcaactcttccacaaggtggcccagcagcagcggcacctggagaagcagcacctgcgaattcagcatctgcaaagccagtttggcctcctggaccacaagcacctagaccatgaggtggccaagcctgcccgaagaaagaggctgcccgagatggcccagccagttgacccggctcacaatgtcagccgcctgcaccggctgcccagggattgccaggagctgttccaggttggggagaggcagagtggactatttgaaatccagcctcaggggtctccgccatttttggtgaactgcaagatgacctcagatggaggctggacagtaattcagaggcgccacgatggctcagtggacttcaaccggccctgggaagcctacaaggcggggtttggggatccccacggcgagttctggctgggtctggagaaggtgcatagcatcacgggggaccgcaacagccgcctggccgtgcagctgcgggactgggatggcaacgccgagttgctgcagttctccgtgcacctgggtggcgaggacacggcctatagcctgcagctcactgcacccgtggccggccagctgggcgccaccaccgtcccacccagcggcctctccgtacccttctccacttgggaccaggatcacgacctccgcagggacaagaactgcgccaagagcctctctggaggctggtggtttggcacctgcagccattccaacctcaacggccagtacttccgctccatcccacagcagcggcagaagcttaagaagggaatcttctggaagacctggcggggccgctactacccgctgcaggccaccaccatgttgatccagcccatggcagcagaggcagcctcctagcgtcctggctgggcctggtcccaggcccacgaaagacggtgactcttggctctgcccgaggatgtggccaagaccacgactggagaagccccctttctgagtgcaggggggctgcatgcgttgcctcctgagatcgaggctgcaggatatgctcagactctagaggcgtggaccaaggggcatggagcttcactccttgctggccagggagttggggactcagagggaccacttggggccagccagactggcctcaatggcggactcagtcacattgactgacggggaccagggcttgtgtgggtcgagagcgccctcatggtgctggtgctgttgtgtgtaggtcccctggggacacaagcaggcgccaatggtatctgggcggagctcacagagttcttggaataaaagcaacctcagaacaaaaaaaaaaaaaaaaaagcggagctcacagagttcttggaataaaagcaacctcagaacaaaaaa

SEQ ID NO: 188 - protein, 405 aa, Homo sapiens [sequence omitted]

SEQ ID NO: 189 - DNA, 1155 bp, Homo sapiens
  CDS (1)..(1155)
agatctggacccgtgcagtccaagtcgccgcgctttgcgtcctgggacgagatgaatgtcctggcgcacggactcctgcagctcggccaggggctgcgcgaacacgcggagcgcacccgcagtcagctgagcgcgctggagcggcgcctgagcgcgtgcgggtccgcctgtcagggaaccgaggggtccaccgacctcccgttagcccctgagagccgggtggaccctgaggtccttcacagcctgcagacacaactcaaggctcagaacagcaggatccagcaactcttccacaaggtggcccagcagcagcggcacctggagaagcagcacctgcgaattcagcatctgcaaagccagtttggcctcctggaccacaagcacctagaccatgaggtggccaagcctgcccgaagaaagaggctgcccgagatggcccagccagttgacccggctcacaatgtcagccgcctgcaccggctgcccagggattgccaggagctgttccaggttggggagaggcagagtggactatttgaaatccagcctcaggggtctccgccatttttggtgaactgcaagatgacctcagatggaggctggacagtaattcagaggcgccacgatggctcagtggacttcaaccggccctgggaagcctacaaggcggggtttggggatccccacggcgagttctggctgggtctggaggaggtgcatagcatcacgggggaccgcaacagccgcctggccgtgcagctgcgggactgggatggcaacgccgagttgctgcagttctccgtgcacctgggtggcgaggacacggcctatagcctgcagctcactgcacccgtggccggccagctgggcgccaccaccgtcccacccagcggcctctccgtacccttctccacttgggaccaggatcacgacctccgcagggacaagaactgcgccaagagcctctctggaggctggtggtttggcacctgcagccattccaacctcaacggccagtacttccgctccatcccacagcagcggcagaagcttaagaagggaatcttctggaagacctggcggggccgctactacccgctgcaggccaccaccatgttgatccagcccatggcagcagaggcagcctccctcgag

SEQ ID NO: 190 - protein, 385 aa, Homo sapiens
RSGPVQSKSPRFASWDEMNVLAHGLLQLGQGLREHAERTRSQLSALERRLSACGSACQGTEGSTDLPLAPESRVDPEVLHSLQTQLKAQNSRIQQLFHKVAQQQRHLEKQHLRIQHLQSQFGLLDHKHLDHEVAKPARRKRLPEMAQPVDPAHNVSRLHRLPRDCQELFQVGERQSGLFEIQPQGSPPFLVNCKMTSDGGWTVIQRRHDGSVDFNRPWEAYKAGFGDPHGEFWLGLEEVHSITGDRNSRLAVQLRDWDGNAELLQFSVHLGGEDTAYSLQLTAPVAGQLGATTVPPSGLSVPFSTWDQDHDLRRDKNCAKSLSGGWWFGTCSHSNLNGQYFRSIPQQRQKLKKGIFWKTWRGRYYPLQATTMLIQPMAAEAASLE

SEQ ID NO: 191 - DNA, 1155 bp, Homo sapiens
  CDS (1)..(1155)
agatctggacccgtgcagtccaagtcgccgcgctttgcgtcctgggacgagatgaatgtcctggcgcacggactcctgcagctcggccaggggctgcgcgaacacgcggagcgcacccgcagtcagctgagcgcgctggagcggcgcctgagcgcgtgcgggtccgcctgtcagggaaccgaggggtccaccgacctcccgttagcccctgagagccgggtggaccctgaggtccttcacagcctgcagacacaactcaaggctcagaacagcaggatccagcaactcttccacaaggtggcccagcagcagcggcacctggagaagcagcacctgcgaattcagcatctgcaaagccagtttggcctcctggaccacaagcacctagaccatgaggtggccaagcctgcccgaagaaagaggctgcccgagatggcccagccagttgacccggctcacaatgtcagccgcctgcaccggctgcccagggattgccaggagctgttccaggttggggagaggcagagtggactatttgaaatccagcctcaggggtctccgccatttttggtgaactgcaagatgacctcagatggaggctggacagtaattcagaggcgccacgatggctcagtggacttcaaccggccctgggaagcctacaaggcggggtttggggatccccacggcgagttctggctgggtctggagaaggtgcatagcatcacgggggaccgcaacagccgcctggccgtgcagctgcgggactgggatggcaacgccgagttgctgcagttctccgtgcacctgggtggcgaggacacggcctatagcctgcagctcactgcacccgtggccggccagctgggcgccaccaccgtcccacccagcggcctctccgtacccttctccacttgggaccaggatcacgacctccgcagggacaagaactgcgccaagagcctctctggaggctggtggtttggcacctgcagccattccaacctcaacggccagtacttccgctccatcccacagcagcggcagaagcttaagaagggaatcttctggaagacctggcggggccgctactacccgctgcaggccaccaccatgttgatccagcccatggcagcagaggcagcctccctcgag

SEQ ID NO: 192 - protein, 385 aa, Homo sapiens
RSGPVQSKSPRFASWDEMNVLAHGLLQLGQGLREHAERTRSQLSALERRLSACGSACQGTEGSTDLPLAPESRVDPEVLHSLQTQLKAQNSRIQQLFHKVAQQQRHLEKQHLRIQHLQSQFGLLDHKHLDHEVAKPARRKRLPEMAQPVDPAHNVSRLHRLPRDCQELFQVGERQSGLFEIQPQGSPPFLVNCKMTSDGGWTVIQRRHDGSVDFNRPWEAYKAGFGDPHGEFWLGLEKVHSITGDRNSRLAVQLRDWDGNAELLQFSVHLGGEDTAYSLQLTAPVAGQLGATTVPPSGLSVPFSTWDQDHDLRRDKNCAKSLSGGWWFGTCSHSNLNGQYFRSIPQQRQKLKKGIFWKTWRGRYYPLQATTMLIQPMAAEAASLE

SEQ ID NO: 193 - DNA, 1155 bp, Homo sapiens
  CDS (1)..(1155)
agatctggacccgtgcagtccaagtcgccgcgctttgcgtcctgggacgagatgaatgtcctggcgcacggactcctgcagctcggccaggggctgcgcgaacacgcggagcgcacccgcagtcagctgagcgcgctggagcggcgcctgagcgcgtgcgggtccgcctgtcagggaaccgaggggtccaccgacctcccgttagcccctgagagccgggtggaccctgaggtccttcacagcctgcagacacaactcaaggctcagaacagcaggatccagcaactcttccacaaggtggcccagcagcagcggcacctggagaagcagcacctgcgaattcagcatctgcaaagccagtttggcctcctggaccacaagcacctagaccatgaggtggccaagcctgcccgaagaaagaggctgcccgagatggcccagccagttgacccggctcacaatgtcagccgcctgcaccggctgcccagggattgccaggagctgttccaggttggggagaggcagagtggactatttgaaatccagcctcaggggtctccgccatttttggtgaactgcaagatgacctcagatggaggctggacagtaattcagaggcgccacgatggctcagtggacttcaaccggccctgggaagcctacaaggcggggtttggggatccccacggcgagttctggctgggtctggagaaggtgcatagcatcacgggggaccgcaacagccgcctggccgtgcagctgcgggactgggatggcaacgccgagttgctgcagttctccgtgcacctgggtggcgaggacacggcctatagcctgcagctcactgcacccgtggccggccagctgggcgccaccaccgtcccacccagcggcctctccgtacccttctccacttgggaccaggatcacgacctccgcagggacaagaactgcgccaagagcctctctggaggctggtggtttggcacctgcagccattccaacctcaacggccagtacttccgctccatcccacagcagcggcagaagcttaagaagggaatcttctggaagacctggcggggccgccactacccgctgcaggccaccaccatgtcgatccagcccatggcagcagaggcagcctccctcgag

SEQ ID NO: 194 - protein, 385 aa, Homo sapiens
RSGPVQSKSPRFASWDEMNVLAHGLLQLGQGLREHAERTRSQLSALERRLSACGSACQGTEGSTDLPLAPESRVDPEVLHSLQTQLKAQNSRIQQLFHKVAQQQRHLEKQHLRIQHLQSQFGLLDHKHLDHEVAKPARRKRLPEMAQPVDPAHNVSRLHRLPRDCQELFQVGERQSGLFEIQPQGSPPFLVNCKMTSDGGWTVIQRRHDGSVDFNRPWEAYKAGFGDPHGEFWLGLEKVHSITGDRNSRLAVQLRDWDGNAELLQFSVHLGGEDTAYSLQLTAPVAGQLGATTVPPSGLSVPFSTWDQDHDLRRDKNCAKSLSGGWWFGTCSHSNLNGQYFRSIPQQRQKLKKGIFWKTWRGRHYPLQATTMSIQPMAAEAASLE

SEQ ID NO: 195 - DNA, 1155 bp, Homo sapiens; identical to SEQ ID NO: 189
  CDS (1)..(1155)

SEQ ID NO: 196 - protein, 385 aa, Homo sapiens; identical to SEQ ID NO: 190

SEQ ID NO: 197 - DNA, 1239 bp, Homo sapiens
  CDS (1)..(1227)
gacgttaacatgagcggtgctccgacggccggggcagccctgatgctctgcgccgccaccgccgtgctactgagcgctcagggcggacccgtgcagtccaagtcgccgcgctttgcgtcctgggacgagatgaatgtcctggcgcacggactcctgcagctcggccaggggctgcgcgaacacgcggagcgcacccgcagtcagctgagcgcgctggagcggcgcctgagcgcgtgcgggtccgcctgtcagggaaccgaggggtccaccgacctcccgttagcccctgagagccgggtggaccctgaggtccttcacagcctgcagacacaactcaaggctcagaacagcaggatccagcaactcttccacaaggtggcccagcagcagcggcacctggagaagcagcacctgcgaattcagcatctgcaaagccagtttggcctcctggaccacaagcacctagaccatgaggtggccaagcctgcccgaagaaagaggctgcccgagatggcccagccagttgacccggctcacaatgtcagccgcctgcaccggctgcccagggattgccaggagctgttccaggttggggagaggcagagtggactatttgaaatccagcctcaggggtctccgccatttttggtgaactgcaagatgacctcagatggaggctggacagtaattcagaggcgccacgatggctcagtggacttcaaccggccctgggaagcctacaaggcggggtttggggatccccacggcgagttctggctgggtctggagaaggtgcatagcatcacgggggaccgcaacagccgcctggccgtgcagctgcgggactgggatggcaacgccgagttgctgcagttctccgtgcacctgggtggcgaggacacggcctatagcctgcagctcactgcacccgtggccggccagctgggcgccaccaccgtcccacccagcggcctctccgtacccttctccacttgggaccaggatcacgacctccgcagggacaagaactgcgccaagagcctctctggaggctggtggtttggcacctgcagccattccaacctcaacggccagtacttccgctccatcccacagcagcggcagaagcttaagaagggaatcttctggaagacctggcggggccgctactacccgctgcaggccaccaccatgttgatccagcccatggcagcagaggcagcctcctagatcgatggg

SEQ ID NO: 198 - protein, 409 aa, Homo sapiens
DVNMSGAPTAGAALMLCAATAVLLSAQGGPVQSKSPRFASWDEMNVLAHGLLQLGQGLREHAERTRSQLSALERRLSACGSACQGTEGSTDLPLAPESRVDPEVLHSLQTQLKAQNSRIQQLFHKVAQQQRHLEKQHLRIQHLQSQFGLLDHKHLDHEVAKPARRKRLPEMAQPVDPAHNVSRLHRLPRDCQELFQVGERQSGLFEIQPQGSPPFLVNCKMTSDGGWTVIQRRHDGSVDFNRPWEAYKAGFGDPHGEFWLGLEKVHSITGDRNSRLAVQLRDWDGNAELLQFSVHLGGEDTAYSLQLTAPVAGQLGATTVPPSGLSVPFSTWDQDHDLRRDKNCAKSLSGGWWFGTCSHSNLNGQYFRSIPQQRQKLKKGIFWKTWRGRYYPLQATTMLIQPMAAEAAS

SEQ ID NO: 199 - DNA, 1233 bp, Homo sapiens
  CDS (1)..(1233)
agatctaccatgagcggtgctccgacggccggggcagccctgatgctctgcgccgccaccgccgtgctactgagcgctcagggcggacccgtgcagtccaagtcgccgcgctttgcgtcctgggacgagatgaatgtcctggcgcacggactcctgcagctcggccaggggctgcgcgaacacgcggagcgcacccgcagtcagctgagcgcgctggagcggcgcctgagcgcgtgcgggtccgcctgtcagggaaccgaggggtccaccgacctcccgttagcccctgagagccgggtggaccctgaggtccttcacagcctgcagacacaactcaaggctcagaacagcaggatccagcaactcttccacaaggtggcccagcagcagcggcacctggagaagcagcacctgcgaattcagcatctgcaaagccagtttggcctcctggaccacaagcacctagaccatgaggtggccaagcctgcccgaagaaagaggctgcccgagatggcccagccagttgacccggctcacaatgtcagccgcctgcaccggctgcccagggattgccaggagctgttccaggttggggagaggcagagtggactatttgaaatccagcctcaggggtctccgccatttttggtgaactgcaagatgacctcagatggaggctggacagtaattcagaggcgccacgatggctcagtggacttcaaccggccctgggaagcctacaaggcggggtttggggatccccacggcgagttctggctgggtctggagaaggtgcatagcatcacgggggaccgcaacagccgcctggccgtgcagctgcgggactgggatggcaacgccgagttgctgcagttctccgtgcacctgggtggcgaggacacggcctatagcctgcagctcactgcacccgtggccggccagctgggcgccaccaccgtcccacccagcggcctctccgtacccttctccacttgggaccaggatcacgacctccgcagggacaagaactgcgccaagagcctctctggaggctggtggtttggcacctgcagccattccaacctcaacggccagtacttccgctccatcccacagcagcggcagaagcttaagaagggaatcttctggaagacctggcggggccgctactacccgctgcaggccaccaccatgttgatccagcccatggcagcagaggcagcctccctcgag

SEQ ID NO: 200 - protein, 411 aa, Homo sapiens
RSTMSGAPTAGAALMLCAATAVLLSAQGGPVQSKSPRFASWDEMNVLAHGLLQLGQGLREHAERTRSQLSALERRLSACGSACQGTEGSTDLPLAPESRVDPEVLHSLQTQLKAQNSRIQQLFHKVAQQQRHLEKQHLRIQHLQSQFGLLDHKHLDHEVAKPARRKRLPEMAQPVDPAHNVSRLHRLPRDCQELFQVGERQSGLFEIQPQGSPPFLVNCKMTSDGGWTVIQRRHDGSVDFNRPWEAYKAGFGDPHGEFWLGLEKVHSITGDRNSRLAVQLRDWDGNAELLQFSVHLGGEDTAYSLQLTAPVAGQLGATTVPPSGLSVPFSTWDQDHDLRRDKNCAKSLSGGWWFGTCSHSNLNGQYFRSIPQQRQKLKKGIFWKTWRGRYYPLQATTMLIQPMAAEAASLE

SEQ ID NO: 201 - DNA, 1239 bp, Homo sapiens
tcatcccgggatgagcggtgctccgacggccggggcagccctgatgctctgcgccgccaccgccgtgctactgagcgctcagggcggacccgtgcagtccaagtcgccgcgctttgcgtcctgggacgagatgaatgtcctggcgcacggactcctgcagctcggccaggggctgcgcgaacacgcggagcgcacccgcagtcagctgagcgcgctggagcggcgcctgagcgcgtgcgggtccgcctgtcagggaaccgaggggtccaccgacctcccgttagcccctgagagccgggtggaccctgaggtccttcacagcctgcagacacaactcaaggctcagaacagcaggatccagcaactcttccacaaggtggcccagcagcagcggcacctggagaagcagcacctgcgaattcagcatctgcaaagccagtttggcctcctggaccacaagcacctagaccatgaggtggccaagcctgcccgaagaaagaggctgcccgagatggcccagccagttgacccggctcacaatgtcagccgcctgcaccggctgcccagggattgccaggagctgttccaggttggggagaggcagagtggactatttgaaatccagcctcaggggtctccgccatttttggtgaactgcaagatgacctcagatggaggctggacagtaattcagaggcgccacgatggctcagtggacttcaaccggccctgggaagcctacaaggcggggtttggggatccccacggcgagttctggctgggtctggagaaggtgcatagcatcacgggggaccgcaacagccgcctggccgtgcagctgcgggactgggatggcaacgccgagttgctgcagttctccgtgcacctgggtggcgaggacacggcctatagcctgcagctcactgcacccgtggccggccagctgggcgccaccaccgtcccacccagcggcctctccgtacccttctccacttgggaccaggatcacgacctccgcagggacaagaactgcgccaagagcctctctggaggctggtggtttggcacctgcagccattccaacctcaacggccagtacttccgctccatcccacagcagcggcagaagcttaagaagggaatcttctggaagacctggcggggccgctactacccgctgcaggccaccaccatgttgatccagcccatggcagcagaggcagcctcccgtcgacgcgt

SEQ ID NO: 202 - protein, 413 aa, Homo sapiens
  misc_feature (413)..(413): Wherein Xaa may be any naturally occurring amino acid
HPGMSGAPTAGAALMLCAATAVLLSAQGGPVQSKSPRFASWDEMNVLAHGLLQLGQGLREHAERTRSQLSALERRLSACGSACQGTEGSTDLPLAPESRVDPEVLHSLQTQLKAQNSRIQQLFHKVAQQQRHLEKQHLRIQHLQSQFGLLDHKHLDHEVAKPARRKRLPEMAQPVDPAHNVSRLHRLPRDCQELFQVGERQSGLFEIQPQGSPPFLVNCKMTSDGGWTVIQRRHDGSVDFNRPWEAYKAGFGDPHGEFWLGLEKVHSITGDRNSRLAVQLRDWDGNAELLQFSVHLGGEDTAYSLQLTAPVAGQLGATTVPPSGLSVPFSTWDQDHDLRRDKNCAKSLSGGWWFGTCSHSNLNGQYFRSIPQQRQKLKKGIFWKTWRGRYYPLQATTMLIQPMAAEAASRRRX

SEQ ID NO: 203 - DNA, 1167 bp, Homo sapiens
  CDS (1)..(1155)
gacgttaacatgggacccgtgcagtccaagtcgccgcgctttgcgtcctgggacgagatgaatgtcctggcgcacggactcctgcagctcggccaggggctgcgcgaacacgcggagcgcacccgcagtcagctgagcgcgctggagcggcgcctgagcgcgtgcgggtccgcctgtcagggaaccgaggggtccaccgacctcccgttagcccctgagagccgggtggaccctgaggtccttcacagcctgcagacacaactcaaggctcagaacagcaggatccagcaactcttccacaaggtggcccagcagcagcggcacctggagaagcagcacctgcgaattcagcatctgcaaagccagtttggcctcctggaccacaagcacctagaccatgaggtggccaagcctgcccgaagaaagaggctgcccgagatggcccagccagttgacccggctcacaatgtcagccgcctgcaccggctgcccagggattgccaggagctgttccaggttggggagaggcagagtggactatttgaaatccagcctcaggggtctccgccatttttggtgaactgcaagatgacctcagatggaggctggacagtaattcagaggcgccacgatggctcagtggacttcaaccggccctgggaagcctacaaggcggggtttggggatccccacggcgagttctggctgggtctggagaaggtgcatagcatcacgggggaccgcaacagccgcctggccgtgcagctgcgggactgggatggcaacgccgagttgctgcagttctccgtgcacctgggtggcgaggacacggcctatagcctgcagctcactgcacccgtggccggccagctgggcgccaccaccgtcccacccagcggcctctccgtacccttctccacttgggaccaggatcacgacctccgcagggacaagaactgcgccaagagcctctctggaggctggtggtttggcacctgcagccattccaacctcaacggccagtacttccgctccatcccacagcagcggcagaagcttaagaagggaatcttctggaagacctggcggggccgctactacccgctgcaggccaccaccatgttgatccagcccatggcagcagaggcagcctcctagatcgatggg

SEQ ID NO: 204 - protein, 385 aa, Homo sapiens
DVNMGPVQSKSPRFASWDEMNVLAHGLLQLGQGLREHAERTRSQLSALERRLSACGSACQGTEGSTDLPLAPESRVDPEVLHSLQTQLKAQNSRIQQLFHKVAQQQRHLEKQHLRIQHLQSQFGLLDHKHLDHEVAKPARRKRLPEMAQPVDPAHNVSRLHRLPRDCQELFQVGERQSGLFEIQPQGSPPFLVNCKMTSDGGWTVIQRRHDGSVDFNRPWEAYKAGFGDPHGEFWLGLEKVHSITGDRNSRLAVQLRDWDGNAELLQFSVHLGGEDTAYSLQLTAPVAGQLGATTVPPSGLSVPFSTWDQDHDLRRDKNCAKSLSGGWWFGTCSHSNLNGQYFRSIPQQRQKLKKGIFWKTWRGRYYPLQATTMLIQPMAAEAAS

SEQ ID NO: 205 - DNA, 1187 bp, Homo sapiens
  CDS (1)..(1155)
gacgttaacatgggacccgtgcagtccaagtcgccgcgctttgcgtcctgggacgagatgaatgtcctggcgcacggactcctgcagctcggccaggggctgcgcgaacacgcggagcgcacccgcagtcagctgagcgcgctggagcggcgcctgagcgcgtgcgggtccgcctgtcagggaaccgaggggtccaccgacctcccgttagcccctgagagccgggtggaccctgaggtccttcacagcctgcagacacaactcaaggctcagaacagcaggatccagcaactcttccacaaggtggcccagcagcagcggcacctggagaagcagcacctgcgaattcagcatctgcaaagccagtttggcctcctggaccacaagcacctagaccatgaggtggccaagcctgcccgaagaaagaggctgcccgagatggcccagccagttgacccggctcacaatgtcagccgcctgcaccggctgcccagggattgccaggagctgttccaggttggggagaggcagagtggactatttgaaatccagcctcaggggtctccgccatttttggtgaactgcaagatgacctcagatggaggctggacagtaattcagaggcgccacgatggctcagtggacttcaaccggccctgggaagcctacaaggcggggtttggggatccccacggcgagttctggctgggtctggagaaggtgcatagcatcacgggggaccgcaacagccgcctggccgtgcagctgcgggactgggatggcaacgccgagttgctgcagttctccgtgcacctgggtggcgaggacacggcctatagcctgcagctcactgcacccgtggccggccagctgggcgccaccaccgtcccacccagcggcctctccgtacccttctccacttgggaccaggatcacgacctccgcagggacaagaactgcgccaagagcctctctggaggctggtggtttggcacctgcagccattccaacctcaacggccagtacttccgctccatcccacagcagcggcagaagcttaagaagggaatcttctggaagacctggcggggccgctactacccgctgcaggccaccaccatgttgatccagcccatggcagcagaggcagcctcctagatcgatgggaagggcgaattctgcagata

SEQ ID NO: 206 - protein, 385 aa, Homo sapiens; identical to SEQ ID NO: 204

SEQ ID NO: 207 - DNA, 1167 bp, Homo sapiens
tcatcccgggatgggacccgtgcagtccaagtcgccgcgctttgcgtcctgggacgagatgaatgtcctggcgcacggactcctgcagctcggccaggggctgcgcgaacacgcggagcgcacccgcagtcagctgagcgcgctggagcggcgcctgagcgcgtgcgggtccgcctgtcagggaaccgaggggtccaccgacctcccgttagcccctgagagccgggtggaccctgaggtccttcacagcctgcagacacaactcaaggctcagaacagcaggatccagcaactcttccacaaggtggcccagcagcagcggcacctggagaagcagcacctgcgaattcagcatctgcaaagccagtttggcctcctggaccacaagcacctagaccatgaggtggccaagcctgcccgaagaaagaggctgcccgagatggcccagccagttgacccggctcacaatgtcagccgcctgcaccggctgcccagggattgccaggagctgttccaggttggggagaggcagagtggactatttgaaatccagcctcaggggtctccgccatttttggtgaactgcaagatgacctcagatggaggctggacagtaattcagaggcgccacgatggctcagtggacttcaaccggccctgggaagcctacaaggcggggtttggggatccccacggcgagttctggctgggtctggagaaggtgcatagcatcacgggggaccgcaacagccgcctggccgtgcagctgcgggactgggatggcaacgccgagttgctgcagttctccgtgcacctgggtggcgaggacacggcctatagcctgcagctcactgcacccgtggccggccagctgggcgccaccaccgtcccacccagcggcctctccgtacccttctccacttgggaccaggatcacgacctccgcagggacaagaactgcgccaagagcctctctggaggctggtggtttggcacctgcagccattccaacctcaacggccagtacttccgctccatcccacagcagcggcagaagcttaagaagggaatcttctggaagacctggcggggccgctactacccgctgcaggccaccaccatgttgatccagcccatggcagcagaggcagcctcccgtcgacgcgt

SEQ ID NO: 208 - protein, 389 aa, Homo sapiens
  misc_feature (389)..(389): Wherein Xaa may be any naturally occurring amino acid
HPGMGPVQSKSPRFASWDEMNVLAHGLLQLGQGLREHAERTRSQLSALERRLSACGSACQGTEGSTDLPLAPESRVDPEVLHSLQTQLKAQNSRIQQLFHKVAQQQRHLEKQHLRIQHLQSQFGLLDHKHLDHEVAKPARRKRLPEMAQPVDPAHNVSRLHRLPRDCQELFQVGERQSGLFEIQPQGSPPFLVNCKMTSDGGWTVIQRRHDGSVDFNRPWEAYKAGFGDPHGEFWLGLEKVHSITGDRNSRLAVQLRDWDGNAELLQFSVHLGGEDTAYSLQLTAPVAGQLGATTVPPSGLSVPFSTWDQDHDLRRDKNCAKSLSGGWWFGTCSHSNLNGQYFRSIPQQRQKLKKGIFWKTWRGRYYPLQATTMLIQPMAAEAASRRRX

SEQ ID NO: 209 - DNA, 738 bp, Homo sapiens
  CDS (1)..(738)
agatctctgcccgagatggcccagccagttgacccggctcacaatgtcagccgcctgcaccggctgcccagggattgccaggagctgttccaggttggggagaggcagagtggactatttgaaatccagcctcaggggtctccgccatttttggtgaactgcaagatgacctcagatggaggctggacagtaattcagaggcgccacgatggctcagtggacttcaaccggccctgggaagcctacaaggcggggtttggggatccccacggcgagttctggctgggtctggagaaggtgcatagcatcacgggggaccgcaacagccgcctggccgtgcagctgcgggactgggatggcaacgccgagttgctgcagttctccgtgcacctgggtggcgaggacacggcctatagcctgcagctcactgcacccgtggccggccagctgggcgccaccaccgtcccacccagcggcctctccgtacccttctccacttgggaccaggatcacgacctccgcagggacaagaactgcgccaagagcctctctggaggctggtggtttggcacctgcagccattccaacctcaacggccagtacttccgctccatcccacagcagcggcagaagcttaagaagggaatcttctggaagacctggcggggccgctactacccgctgcaggccaccaccatgttgatccagcccatggcagcagaggcagcctccctcgag

SEQ ID NO: 210 - protein, 246 aa, Homo sapiens
RSLPEMAQPVDPAHNVSRLHRLPRDCQELFQVGERQSGLFEIQPQGSPPFLVNCKMTSDGGWTVIQRRHDGSVDFNRPWEAYKAGFGDPHGEFWLGLEKVHSITGDRNSRLAVQLRDWDGNAELLQFSVHLGGEDTAYSLQLTAPVAGQLGATTVPPSGLSVPFSTWDQDHDLRRDKNCAKSLSGGWWFGTCSHSNLNGQYFRSIPQQRQKLKKGIFWKTWRGRYYPLQATTMLIQPMAAEAASLE

SEQ ID NO: 211 - DNA, 1218 bp, Homo sapiens
  CDS (1)..(1218)
agatctggacccgtgcagtccaagtcgccgcgctttgcgtcctgggacgagatgaatgtcctggcgcacggactcctgcagctcggccaggggctgcgcgaacacgcggagcgcacccgcagtcagctgagcgcgctggagcggcgcctgagcgcgtgcgggtccgcctgtcagggaaccgaggggtccaccgacctcccgttagcccctgagagccgggtggaccctgaggtccttcacagcctgcagacacaactcaaggctcagaacagcaggatccagcaactcttccacaaggtggcccagcagcagcggcacctggagaagcagcacctgcgaattcagcatctgcaaagccagtttggcctcctggaccacaagcacctagaccatgaggtggccaagcctgcccgaagaaagaggctgcccgagatggcccagccagttgacccggctcacaatgtcagccgcctgcaccggctgcccagggattgccaggagctgttccatgttggggagaggcagagtggactatttgaaatccagcctcaggggtctccgccatttttggtgaactgcaagatgacctcagatggaggctggacagtaattcagaggcgccacgatggctcagtggacttcaaccggccctgggaagcctacaaggcggggtttggggatccccacggcgagttctggctgggtctggagaaggtgcatagcatcacgggggaccgcaacagccgcctggccgtgcagctgcgggactgggatggcaacgccgagttgctgcagttctccgtgcacctgggtggcgaggacacggcctatagcctgcagctcactgcacccgtggccggccagctgggcgccaccaccgtcccacccagcggcctctccgtacccttctccacttgggaccaggatcacgacctccgcagggacaagaactgcgccaagagcctctctgccccatcggtggctcaaagacctgaccatgttccctctcccctgaccccggcaggaggctggtggtttggcacctgcagccattccaacctcaacggccagtacttccgctccatcccacagcagcggcagaagcttaagaagggaatcttctggaagacctggcggggccgctactacccgctgcaggccaccaccatgttgatccagcccatggcagcagaggcagcctccctcgagaagggcgaa

SEQ ID NO: 212 - protein, 406 aa, Homo sapiens
RSGPVQSKSPRFASWDEMNVLAHGLLQLGQGLREHAERTRSQLSALERRLSACGSACQGTEGSTDLPLAPESRVDPEVLHSLQTQLKAQNSRIQQLFHKVAQQQRHLEKQHLRIQHLQSQFGLLDHKHLDHEVAKPARRKRLPEMAQPVDPAHNVSRLHRLPRDCQELFHVGERQSGLFEIQPQGSPPFLVNCKMTSDGGWTVIQRRHDGSVDFNRPWEAYKAGFGDPHGEFWLGLEKVHSITGDRNSRLAVQLRDWDGNAELLQFSVHLGGEDTAYSLQLTAPVAGQLGATTVPPSGLSVPFSTWDQDHDLRRDKNCAKSLSAPSVAQRPDHVPSPLTPAGGWWFGTCSHSNLNGQYFRSIPQQRQKLKKGIFWKTWRGRYYPLQATTMLIQPMAAEAASLEKGE

SEQ ID NO: 213 - DNA, 1223 bp, Homo sapiens
  CDS (3)..(1223)
cagaattcgcccttagatctggacccgtgcagtccaagtcgccgcgctttgcgtcctgggacgagatgaatgtcctggcgcacggactcctgcagctcggccaggggctgcgcgaacacgcggagcgcacccgcagtcagctgagcgcgctggagcggcgcctgagcgcgtgcgggtccgcctgtcagggaaccgaggggtccaccgacctcccgttagcccctgagagccgggtggaccctgaggtccttcacagcctgcagacacaactcaaggctcagaacagcaggatccagcaactcttccacaaggtggcccagcagcagcggcacctggagaagcagcacctgcgaattcagcatctgcaaagccagtttggcctcctggaccacaagcacctagaccatgaggtggccaagcctgcccgaagaaagaggctgcccgagatggcccagccagttgacccggctcacaatgtcagccgcctgcaccggctgcccagggattgccaggagctgttccaggttggggagaggcagagtggactatttgaaatccagcctcaggggtctccgccatttttggtgaactgcaagatgacctcagatggaggctggacagtaattcagaggcgccacgatggctcagtggacttcaaccggccctgggaagcctacaaggcggggtttggggatccccacggcgagttctggctgggtctggagaaggtgcatagcatcatgggggaccgcaacagccgcctggccgtgcagctgcgggactgggatggcaacgccgagttgctgcagttctccgtgcacctgggtggcgaggacacggcctatagcctgcagctcactgcacccgtggccggccagctgggcgccaccaccgtcccacccagcggcctctccgtacccttctccacttgggaccaggatcacgacctccgcagggacaagaactgcgccaagagcctctctgccccatcggtggctcaaagacctgaccatgttccctctcccctgaccccggcaggaggctggtggtttggcacctgcagccattccaacctcaacggccagtacttccgctccatcccacagcagcggcagaagcttaagaagggaatcttctggaagacctggcggggccgctactacccgctgcaggccaccaccatgttgatccagcccatggcagcagaggcagcctccctcgag

SEQ ID NO: 214 - protein, 407 aa, Homo sapiens
EFALRSGPVQSKSPRFASWDEMNVLAHGLLQLGQGLREHAERTRSQLSALERRLSACGSACQGTEGSTDLPLAPESRVDPEVLHSLQTQLKAQNSRIQQLFHKVAQQQRHLEKQHLRIQHLQSQFGLLDHKHLDHEVAKPARRKRLPEMAQPVDPAHNVSRLHRLPRDCQELFQVGERQSGLFEIQPQGSPPFLVNCKMTSDGGWTVIQRRHDGSVDFNRPWEAYKAGFGDPHGEFWLGLEKVHSIMGDRNSRLAVQLRDWDGNAELLQFSVHLGGEDTAYSLQLTAPVAGQLGATTVPPSGLSVPFSTWDQDHDLRRDKNCAKSLSAPSVAQRPDHVPSPLTPAGGWWFGTCSHSNLNGQYFRSIPQQRQKLKKGIFWKTWRGRYYPLQATTMLIQPMAAEAASLE

SEQ ID NO: 215 - DNA, 1041 bp, Homo sapiens
  CDS (1)..(1041)
agatctggacccgtgcagtccaagtcgccgcgctttgcgtcctgggacgagatgaatgtcctggcgcacggactcctgcagctcggccaggggctgcgcgaacacgcggagcgcacccgcagtcagctgagcgcgctggagcggcgcctgagcgcgtgcgggtccgcctgtcagggaaccgaggggtccaccgacctcccgttagcccctgagagccgggtggaccctgaggtccttcacagcctgcagacacaactcaaggctcagaacagcaggatccagcaactcttccacaaggtggcccagcagcagcggcacctggagaagcagcacctgcgaattcagcatctgcaaagccagtttggcctcctggaccacaagcacctagaccatgaggtggccaagcctgcccgaagaaagaggctgcccgagatggcccagccagttgacccggctcacaatgtcagccgcctgcaccatggaggctggacagtaattcagaggcgccacgatggctcagtggacttcaaccggccctgggaagcctacaaggcggggtttggggatccccacggcgagttctggctgggtctggagaaggtgcatagcatcatgggggaccgcaacagccgcctggccgtgcagctgcgggactgggatggcaacgccgagttgctgcagttctccgtgcacctgggtggcgaggacacggcctatagcctgcagctcactgcacccgtggccggccagctgggcgccaccaccgtcccacccagcggcctctccgtacccttctccacttgggaccaggatcacgacctccgcagggacaagaactgcgccaagagcctctctggaggctggtggtttggcacctgcagccattccaacctcaacggccagtacttccgctccatcccacagcagcggcagaagcttaagaagggaatcttctggaagacctggcggggccgctactacccgctgcaggccaccaccatgttgatccagcccatggcagcagaggcagcctccctcgag

SEQ ID NO: 216 - protein, 347 aa, Homo sapiens
RSGPVQSKSPRFASWDEMNVLAHGLLQLGQGLREHAERTRSQLSALERRLSACGSACQGTEGSTDLPLAPESRVDPEVLHSLQTQLKAQNSRIQQLFHKVAQQQRHLEKQHLRIQHLQSQFGLLDHKHLDHEVAKPARRKRLPEMAQPVDPAHNVSRLHHGGWTVIQRRHDGSVDFNRPWEAYKAGFGDPHGEFWLGLEKVHSIMGDRNSRLAVQLRDWDGNAELLQFSVHLGGEDTAYSLQLTAPVAGQLGATTVPPSGLSVPFSTWDQDHDLRRDKNCAKSLSGGWWFGTCSHSNLNGQYFRSIPQQRQKLKKGIFWKTWRGRYYPLQATTMLIQPMAAEAASLE

SEQ ID NO: 217 - DNA, 1209 bp, Homo sapiens
  CDS (1)..(1209)
agatctggacccgtgcagtccaagtcgccgcgctttgcgtcctgggacgagatgaatgtcctggcgcacggactcctgcagctcggccaggggctgcgcgaacacgcggagcgcacccgcagtcagctgagcgcgctggagcggcgcctgagcgcgtgcgggtccgcctgtcagggaaccgaggggtccaccgacctcccgttagcccctgagagccgggtggaccctgaggtccttcacagcctgcagacacaactcaaggctcagaacagcaggatccagcaactcttccacaaggtggcccagcagcagcggcacctggagaagcagcacctgcgaattcagcatctgcaaagccagtttggcctcctggaccacaagcacctagaccatgaggtggccaagcctgcccgaagaaagaggctgcccgagatggcccagccagttgacccggctcacaatgtcagccgcctgcaccggctgcccagggattgccaggagctgttccaggttggggagaggcagagtggactatttgaaatccagcctcaggggtctccgccatttttggtgaactgcaagatgacctcagatggaggctggacagtaattcagaggcgccacgatggctcagtggacttcaaccggccctgggaagcctacaaggcggggtttggggatccccacggcgagttctggctgggtctggagaaggtgcatagcatcacgggggaccgcaacagccgcctggccgtgcagctgcgggactgggatggcaacgccgagttgctgcagttctccgtgcacctgggtggcgaggacacggcctatagcctgcagctcactgcacccgtggccggccagctgggcgccaccaccgtcccacccagcggcctctccgtacccttctccacttgggaccaggatcacgacctccgcagggacaagaactgcgccaagagcctctctgccccatcggtggctcaaagacctgaccatgttccctctcccctgaccccggcaggaggctggtggtttggcacctgcagccattccaacctcaacggccagtacttccgctccatcccacagcagcggcagaagcttaagaagggaatcttctggaagacctggcggggccgctactacccgctgcaggccaccaccatgttgatccagcccatggcagcagaggcagcctccctcgag

SEQ ID NO: 218 - protein, 403 aa, Homo sapiens
RSGPVQSKSPRFASWDEMNVLAHGLLQLGQGLREHAERTRSQLSALERRLSACGSACQGTEGSTDLPLAPESRVDPEVLHSLQTQLKAQNSRIQQLFHKVAQQQRHLEKQHLRIQHLQSQFGLLDHKHLDHEVAKPARRKRLPEMAQPVDPAHNVSRLHRLPRDCQELFQVGERQSGLFEIQPQGSPPFLVNCKMTSDGGWTVIQRRHDGSVDFNRPWEAYKAGFGDPHGEFWLGLEKVHSITGDRNSRLAVQLRDWDGNAELLQFSVHLGGEDTAYSLQLTAPVAGQLGATTVPPSGLSVPFSTWDQDHDLRRDKNCAKSLSAPSVAQRPDHVPSPLTPAGGWWFGTCSHSNLNGQYFRSIPQQRQKLKKGIFWKTWRGRYYPLQATTMLIQPMAAEAASLE

SEQ ID NO: 219 - DNA, 1258 bp, Homo sapiens
  CDS (2)..(1258)
aggctccgcggccgcccccttcaccatgagcggtgctccgacggccggggcagccctgatgctctgcgccgccaccgccgtgctactgagcgctcagggcggacccgtgcagtccaagtcgccgcgctttgcgtcctgggacgagatgaatgtcctggcgcacggactcctgcagctcggccaggggctgcgcgaacacgcggagcgcacccgcagtcagctgagcgcgctggagcggcgcctgagcgcgtgcgggtccgcctgtcagggaaccgaggggtccaccgacctcccgttagcccctgagagccgggtggaccctgaggtccttcacagcctgcagacacaactcaaggctcagaacagcaggatccagcaactcttccacaaggtggcccagcagcagcggcacctggagaagcagcacctgcgaattcagcatctgcaaagccagtttggcctcctggaccacaagcacctagaccatgaggtggccaagcctgcccgaagaaagaggctgcccgagatggcccagccagttgacccggctcacaatgtcagccgcctgcaccggctgcccagggattgccaggagctgttccaggttggggagaggcagagtggactatttgaaatccagcctcaggggtctccgccatttttggtgaactgcaagatgacctcagatggaggctggacagtaattcagaggcgccacgatggctcagtggacttcaaccggccctgggaagcctacaaggcggggtttggggatccccacggcgagttctggctgggtctggagaaggtgcatagcatcacgggggaccgcaacagccgcctggccgtgcagctgcgggactgggatggcaacgccgagttgctgcagttctccgtgcacctgggtggcgaggacacggcctatagcctgcagctcactgcacccgtggccggccagctgggcgccaccaccgtcccacccagcggcctctccgtacccttctccacttgggaccaggatcacgacctccgcagggacaagaactgcgccaagagcctctctggaggctggtggtttggcacctgcagccattccaacctcaacggccagtacttccgctccatcccacagcagcggcagaagcttaagaagggaatcttctggaagacctggcggggccgctactacccgctgcaggccaccaccatgttgatccagcccatggcagcagaggcagcctccaagggtgggcgcgcc

SEQ ID NO: 220 - protein, 419 aa, Homo sapiens
GSAAAPFTMSGAPTAGAALMLCAATAVLLSAQGGPVQSKSPRFASWDEMNVLAHGLLQLGQGLREHAERTRSQLSALERRLSACGSACQGTEGSTDLPLAPESRVDPEVLHSLQTQLKAQNSRIQQLFHKVAQQQRHLEKQHLRIQHLQSQFGLLDHKHLDHEVAKPARRKRLPEMAQPVDPAHNVSRLHRLPRDCQELFQVGERQSGLFEIQPQGSPPFLVNCKMTSDGGWTVIQRRHDGSVDFNRPWEAYKAGFGDPHGEFWLGLEKVHSITGDRNSRLAVQLRDWDGNAELLQFSVHLGGEDTAYSLQLTAPVAGQLGATTVPPSGLSVPFSTWDQDHDLRRDKNCAKSLSGGWWFGTCSHSNLNGQYFRSIPQQRQKLKKGIFWKTWRGRYYPLQATTMLIQPMAAEAASKGGRA

SEQ ID NO: 221 - DNA, 1239 bp, Homo sapiens
  CDS (1)..(1227)
gacgttaacatgagcggtgctccgacggccggggcagccctgatgctctgcgccgccaccgccgtgctactgagcgctcagggcggacccgtgcagtccaagtcgccgcgctttgcgtcctgggacgagatgaatgtcctggcgcacggactcctgcagctcggccaggggctgcgcgaacacgcggagcgcacccgcagtcagctgagcgcgctggagcggcgcctgagcgcgtgcgggtccgcctgtcagggaaccgaggggtccaccgacctcccgttagcccctgagagccgggtggaccctgaggtccttcacagcctgcagacacaactcaaggctcagaacagcaggatccagcaactcttccacaaggtggcccagcagcagcggcacctggagaagcagcacctgcgaattcagcatctgcaaagccagtttggcctcctggaccacaagcacctagaccatgaggtggccaagcctgcccgaagaaagaggctgcccgagatggcccagccagttgacccggctcacaatgtcagccgcctgcaccggctgcccagggattgccaggagctgttccaggttggggagaggcagagtggactatttgaaatccagcctcaggggtctccgccatttttggtgaactgcaagatgacctcagatggaggctggacagtaattcagaggcgccacgatggctcagtggacttcaaccggccctgggaagcctacaaggcggggtttggggatccccacggcgagttctggctgggtctggagaaggtgcatagcatcacgggggaccgcaacagccgcctggccttgcagctgcgggactgggatggcaacgccgagttgctgcagttctccgtgcacctgggtggcgaggacacggcctatagcctgcagctcactgcacccgtggccggccagctgggcgccaccaccgtcccacccagcggcctctccgtacccttctccacttgggaccaggatcacgacctccgcagggacaagaactgcgccaagagcctctctggaggctggtggtttggcacctgcagccattccaacctcaacggccagtacttccgctccatcccacagcagcggcagaagcttaagaagggaatcttctggaagacctggcggggccgctactacccgctgcaggccaccaccatgttgatccagcccatggcagcagaggcagcctcctagatcgatggg

SEQ ID NO: 222 - protein, 409 aa, Homo sapiens
DVNMSGAPTAGAALMLCAATAVLLSAQGGPVQSKSPRFASWDEMNVLAHGLLQLGQGLREHAERTRSQLSALERRLSACGSACQGTEGSTDLPLAPESRVDPEVLHSLQTQLKAQNSRIQQLFHKVAQQQRHLEKQHLRIQHLQSQFGLLDHKHLDHEVAKPARRKRLPEMAQPVDPAHNVSRLHRLPRDCQELFQVGERQSGLFEIQPQGSPPFLVNCKMTSDGGWTVIQRRHDGSVDFNRPWEAYKAGFGDPHGEFWLGLEKVHSITGDRNSRLALQLRDWDGNAELLQFSVHLGGEDTAYSLQLTAPVAGQLGATTVPPSGLSVPFSTWDQDHDLRRDKNCAKSLSGGWWFGTCSHSNLNGQYFRSIPQQRQKLKKGIFWKTWRGRYYPLQATTMLIQPMAAEAAS

SEQ ID NO: 223 - DNA, 1143 bp, Homo sapiens
  CDS (1)..(1143)
ggacccgtgcagtccaagtcgccgcgctttgcgtcctgggacgagatgaatgtcctggcgcacggactcctgcagctcggccaggggctgcgcgaacacgcggagcgcacccgcagtcagctgagcgcgctggagcggcgcctgagcgcgtgcgggtccgcctgtcagggaaccgaggggtccaccgacctcccgttagcccctgagagccgggtggaccctgaggtccttcacagcctgcagacacaactcaaggctcagaacagcaggatccagcaactcttccacaaggtggcccagcagcagcggcacctggagaagcagcacctgcgaattcagcatctgcaaagccagtttggcctcctggaccacaagcacctagaccatgaggtggccaagcctgcccgaagaaagaggctgcccgagatggcccagccagttgacccggctcacaatgtcagccgcctgcaccggctgcccagggattgccaggagctgttccaggttggggagaggcagagtggactatttgaaatccagcctcaggggtctccgccatttttggtgaactgcaagatgacctcagatggaggctggacagtaattcagaggcgccacgatggctcagtggacttcaaccggccctgggaagcctacaaggcggggtttggggatccccacggcgagttctggctgggtctggagaaggtgcatagcatcacgggggaccgcaacagccgcctggccgtgcagctgcgggactgggatggcaacgccgagttgctgcagttctccgtgcacctgggtggcgaggacacggcctatagcctgcagctcactgcacccgtggccggccagctgggcgccaccaccgtcccacccagcggcctctccgtacccttctccacttgggaccaggatcacgacctccgcagggacaagaactgcgccaagagcctctctggaggctggtggtttggcacctgcagccattccaacctcaacggccagtacttccgctccatcccacagcagcggcagaagcttaagaagggaatcttctggaagacctggcggggccgctactacccgctgcaggccaccaccatgttgatccagcccatggcagcagaggcagcctcc

SEQ ID NO: 224 - protein, 381 aa, Homo sapiens
GPVQSKSPRFASWDEMNVLAHGLLQLGQGLREHAERTRSQLSALERRLSACGSACQGTEGSTDLPLAPESRVDPEVLHSLQTQLKAQNSRIQQLFHKVAQQQRHLEKQHLRIQHLQSQFGLLDHKHLDHEVAKPARRKRLPEMAQPVDPAHNVSRLHRLPRDCQELFQVGERQSGLFEIQPQGSPPFLVNCKMTSDGGWTVIQRRHDGSVDFNRPWEAYKAGFGDPHGEFWLGLEKVHSITGDRNSRLAVQLRDWDGNAELLQFSVHLGGEDTAYSLQLTAPVAGQLGATTVPPSGLSVPFSTWDQDHDLRRDKNCAKSLSGGWWFGTCSHSNLNGQYFRSIPQQRQKLKKGIFWKTWRGRYYPLQATTMLIQPMAAEAAS

SEQ ID NO: 225 - DNA, 1154 bp, Homo sapiens
  CDS (1)..(1152)
agatctggacccgtgcagtccaagtcgccgcgctttgcgtcctgggacgagatgaatgtcctggcgcacggactcctgcagctcggccaggggctgcgcgaacacgcggagcgcacccgcagtcagctgagcgcgctggagcggcgcctgagcgcgtgcgggtccgcctgtcagggaaccgaggggtccaccgacctcccgttagcccctgagagccgggtggaccctgaggtccttcacagcctgcagacacaactcaaggctcagaacagcaggatccagcaactcttccacaaggtggcccagcagcagcggcacctggagaagcagcacctgcgaattcagcatctgcaaagccagtttggcctcctggaccacaagcacctagaccatgaggtggccaagcctgcccgaagaaagaggctgcccgagatggcccagccagttgacccggctcacaatgtcagccgcctgcaccggctgcccagggattgccaggagctgttccaggttggggagaggcagagtggactatttgaaatccagcctcaggggtctccgccatttttggtgaactgcaagatgacctcagatggaggctggacagtaattcagaggcgccacgatggctcagtggacttcaaccggccctgggaagcctacaaggcggggtttggggatccccacggcgagttctggctgggtctggagaaggtgcatagcatcacgggggaccgcaacagccgcctggccgtgcagctgcgggactgggatggcaacgccgagttgctgcagttctccgtgcacctgggtggcgaggacacggcctatagcctgcagctcactgcacccgtggccggccagctgggcgccaccaccgtcccacccagcggcctctccgtacccttctccacttgggaccaggatcacgatctccgcagggacaagaactgcgccaagagcctctctggaggctggtggtttggcacctgcagccattccaacctcaacggccagtacttccgctccatcccacagcagcggcagaagcttaagaagggaatcttctggaagacctggcggggccgctactacccgctgcaggccaccaccatgttgatccagcccatggcagcagaggagcctccctcgag

SEQ ID NO: 226 - protein, 384 aa, Homo sapiens
RSGPVQSKSPRFASWDEMNVLAHGLLQLGQGLREHAERTRSQLSALERRLSACGSACQGTEGSTDLPLAPESRVDPEVLHSLQTQLKAQNSRIQQLFHKVAQQQRHLEKQHLRIQHLQSQFGLLDHKHLDHEVAKPARRKRLPEMAQPVDPAHNVSRLHRLPRDCQELFQVGERQSGLFEIQPQGSPPFLVNCKMTSDGGWTVIQRRHDGSVDFNRPWEAYKAGFGDPHGEFWLGLEKVHSITGDRNSRLAVQLRDWDGNAELLQFSVHLGGEDTAYSLQLTAPVAGQLGATTVPPSGLSVPFSTWDQDHDLRRDKNCAKSLSGGWWFGTCSHSNLNGQYFRSIPQQRQKLKKGIFWKTWRGRYYPLQATTMLIQPMAAEEPPS

SEQ ID NO: 227 - DNA, 1155 bp, Homo sapiens; identical to SEQ ID NO: 191
  CDS (7)..(1155)

SEQ ID NO: 228 - protein, 383 aa, Homo sapiens
GPVQSKSPRFASWDEMNVLAHGLLQLGQGLREHAERTRSQLSALERRLSACGSACQGTEGSTDLPLAPESRVDPEVLHSLQTQLKAQNSRIQQLFHKVAQQQRHLEKQHLRIQHLQSQFGLLDHKHLDHEVAKPARRKRLPEMAQPVDPAHNVSRLHRLPRDCQELFQVGERQSGLFEIQPQGSPPFLVNCKMTSDGGWTVIQRRHDGSVDFNRPWEAYKAGFGDPHGEFWLGLEKVHSITGDRNSRLAVQLRDWDGNAELLQFSVHLGGEDTAYSLQLTAPVAGQLGATTVPPSGLSVPFSTWDQDHDLRRDKNCAKSLSGGWWFGTCSHSNLNGQYFRSIPQQRQKLKKGIFWKTWRGRYYPLQATTMLIQPMAAEAASLE

SEQ ID NO: 229 - DNA, 1155 bp, Homo sapiens; identical to SEQ ID NO: 193
  CDS (7)..(1149)

SEQ ID NO: 230 - protein, 381 aa, Homo sapiens
GPVQSKSPRFASWDEMNVLAHGLLQLGQGLREHAERTRSQLSALERRLSACGSACQGTEGSTDLPLAPESRVDPEVLHSLQTQLKAQNSRIQQLFHKVAQQQRHLEKQHLRIQHLQSQFGLLDHKHLDHEVAKPARRKRLPEMAQPVDPAHNVSRLHRLPRDCQELFQVGERQSGLFEIQPQGSPPFLVNCKMTSDGGWTVIQRRHDGSVDFNRPWEAYKAGFGDPHGEFWLGLEKVHSITGDRNSRLAVQLRDWDGNAELLQFSVHLGGEDTAYSLQLTAPVAGQLGATTVPPSGLSVPFSTWDQDHDLRRDKNCAKSLSGGWWFGTCSHSNLNGQYFRSIPQQRQKLKKGIFWKTWRGRHYPLQATTMSIQPMAAEAAS

SEQ ID NO: 231 - DNA, 1154 bp, Homo sapiens
  CDS (7)..(1149)
agatctggacccgtgcagtccaagtcgccgcgctttgtgtcctgggacgagatgaatgccctggcgcacggactcctgcagctcggccaggggctgcgcgaacacgcggagcgcacccgcagtcagctgagcgcgctggagcggcgcctgagcgcgtgcgggtccgcctgtcagggaaccgaggggtccaccgacctcccgttagcccctgagagccgggtggaccctgaggtccttcacagcctgcagacacaactcaaggctcagaacagcaggatccagcaactcttccacaaggtggcccagcagcagcggcacctggagaagcagcacctgcgaattcagcatctgcaaagccagtttggcctcctggaccacaagcacctagaccatgaggtggccaagcctgcccgaagaaagaggctgcccgagatggcccagccagttgacccggctcacaatgtcagccgcctgcaccggctgcccagggattgccaggagctgttccaggttggggagaggcagagtggactatttgaaatccagcctcaggggtctccgccatttttggtgaactgcaagatgacctcagatggaggctggacagtaattcagaggcgccacgatggctcagtggacttcaaccggccctgggaagcctacaaggcggggtttggggatccccacggcgagttctggctgggtctggagaaggtgcatagcatcatgggggaccgcaacagccgcctggccgtgcagctgcgggactgggatggcaacgccgagttgctgcagttctccgtgcacctgggtggcgaggacacggcctatagcctgcagctcactgcacccgtggccggccagctgggcgccaccaccgtcccacccagcggcctctccgtacccttctccacttgggaccaggatcacgacctccgcagggacaagaactgcgccaagagcctctctggaggctggtggtttggcacctgcagccattccaacctcaacggccagtacttccgctccatcccacagcagcggcagaagcttaagaagggaatcttctggaagacctggcggggccgctactacccgctgcaggccaccaccatgttgatccagcccatggcagcagaggcagcctcctcgag

SEQ ID NO: 232 - protein, 381 aa, Homo sapiens
GPVQSKSPRFVSWDEMNALAHGLLQLGQGLREHAERTRSQLSALERRLSACGSACQGTEGSTDLPLAPESRVDPEVLHSLQTQLKAQNSRIQQLFHKVAQQQRHLEKQHLRIQHLQSQFGLLDHKHLDHEVAKPARRKRLPEMAQPVDPAHNVSRLHRLPRDCQELFQVGERQSGLFEIQPQGSPPFLVNCKMTSDGGWTVIQRRHDGSVDFNRPWEAYKAGFGDPHGEFWLGLEKVHSIMGDRNSRLAVQLRDWDGNAELLQFSVHLGGEDTAYSLQLTAPVAGQLGATTVPPSGLSVPFSTWDQDHDLRRDKNCAKSLSGGWWFGTCSHSNLNGQYFRSIPQQRQKLKKGIFWKTWRGRYYPLQATTMLIQPMAAEAAS

SEQ ID NO: 233 - DNA, 1155 bp, Homo sapiens; identical to SEQ ID NO: 189
  CDS (7)..(1149)

SEQ ID NO: 234 - protein, 381 aa, Homo sapiens
GPVQSKSPRFASWDEMNVLAHGLLQLGQGLREHAERTRSQLSALERRLSACGSACQGTEGSTDLPLAPESRVDPEVLHSLQTQLKAQNSRIQQLFHKVAQQQRHLEKQHLRIQHLQSQFGLLDHKHLDHEVAKPARRKRLPEMAQPVDPAHNVSRLHRLPRDCQELFQVGERQSGLFEIQPQGSPPFLVNCKMTSDGGWTVIQRRHDGSVDFNRPWEAYKAGFGDPHGEFWLGLEEVHSITGDRNSRLAVQLRDWDGNAELLQFSVHLGGEDTAYSLQLTAPVAGQLGATTVPPSGLSVPFSTWDQDHDLRRDKNCAKSLSGGWWFGTCSHSNLNGQYFRSIPQQRQKLKKGIFWKTWRGRYYPLQATTMLIQPMAAEAAS

SEQ ID NO: 235 - DNA, 1258 bp, Homo sapiens; identical to SEQ ID NO: 219
  CDS (26)..(1243)

SEQ ID NO: 236 - protein, 406 aa, Homo sapiens
MSGAPTAGAALMLCAATAVLLSAQGGPVQSKSPRFASWDEMNVLAHGLLQLGQGLREHAERTRSQLSALERRLSACGSACQGTEGSTDLPLAPESRVDPEVLHSLQTQLKAQNSRIQQLFHKVAQQQRHLEKQHLRIQHLQSQFGLLDHKHLDHEVAKPARRKRLPEMAQPVDPAHNVSRLHRLPRDCQELFQVGERQSGLFEIQPQGSPPFLVNCKMTSDGGWTVIQRRHDGSVDFNRPWEAYKAGFGDPHGEFWLGLEKVHSITGDRNSRLAVQLRDWDGNAELLQFSVHLGGEDTAYSLQLTAPVAGQLGATTVPPSGLSVPFSTWDQDHDLRRDKNCAKSLSGGWWFGTCSHSNLNGQYFRSIPQQRQKLKKGIFWKTWRGRYYPLQATTMLIQPMAAEAAS

SEQ ID NO: 237 - DNA, 1209 bp, Homo sapiens; identical to SEQ ID NO: 217
  CDS (7)..(1203)

SEQ ID NO: 238 - protein, 399 aa, Homo sapiens
GPVQSKSPRFASWDEMNVLAHGLLQLGQGLREHAERTRSQLSALERRLSACGSACQGTEGSTDLPLAPESRVDPEVLHSLQTQLKAQNSRIQQLFHKVAQQQRHLEKQHLRIQHLQSQFGLLDHKHLDHEVAKPARRKRLPEMAQPVDPAHNVSRLHRLPRDCQELFQVGERQSGLFEIQPQGSPPFLVNCKMTSDGGWTVIQRRHDGSVDFNRPWEAYKAGFGDPHGEFWLGLEKVHSITGDRNSRLAVQLRDWDGNAELLQFSVHLGGEDTAYSLQLTAPVAGQLGATTVPPSGLSVPFSTWDQDHDLRRDKNCAKSLSAPSVAQRPDHVPSPLTPAGGWWFGTCSHSNLNGQYFRSIPQQRQKLKKGIFWKTWRGRYYPLQATTMLIQPMAAEAAS

SEQ ID NO: 239 - DNA, 1041 bp, Homo sapiens; identical to SEQ ID NO: 215
  CDS (7)..(1035)

SEQ ID NO: 240 - protein, 343 aa, Homo sapiens
GPVQSKSPRFASWDEMNVLAHGLLQLGQGLREHAERTRSQLSALERRLSACGSACQGTEGSTDLPLAPESRVDPEVLHSLQTQLKAQNSRIQQLFHKVAQQQRHLEKQHLRIQHLQSQFGLLDHKHLDHEVAKPARRKRLPEMAQPVDPAHNVSRLHHGGWTVIQRRHDGSVDFNRPWEAYKAGFGDPHGEFWLGLEKVHSIMGDRNSRLAVQLRDWDGNAELLQFSVHLGGEDTAYSLQLTAPVAGQLGATTVPPSGLSVPFSTWDQDHDLRRDKNCAKSLSGGWWFGTCSHSNLNGQYFRSIPQQRQKLKKGIFWKTWRGRYYPLQATTMLIQPMAAEAAS

SEQ ID NO: 241 - DNA, 1223 bp, Homo sapiens; identical to SEQ ID NO: 213
  CDS (21)..(1217)

SEQ ID NO: 242 - protein, 399 aa, Homo sapiens
GPVQSKSPRFASWDEMNVLAHGLLQLGQGLREHAERTRSQLSALERRLSACGSACQGTEGSTDLPLAPESRVDPEVLHSLQTQLKAQNSRIQQLFHKVAQQQRHLEKQHLRIQHLQSQFGLLDHKHLDHEVAKPARRKRLPEMAQPVDPAHNVSRLHRLPRDCQELFQVGERQSGLFEIQPQGSPPFLVNCKMTSDGGWTVIQRRHDGSVDFNRPWEAYKAGFGDPHGEFWLGLEKVHSIMGDRNSRLAVQLRDWDGNAELLQFSVHLGGEDTAYSLQLTAPVAGQLGATTVPPSGLSVPFSTWDQDHDLRRDKNCAKSLSAPSVAQRPDHVPSPLTPAGGWWFGTCSHSNLNGQYFRSIPQQRQKLKKGIFWKTWRGRYYPLQATTMLIQPMAAEAAS

SEQ ID NO: 243 - DNA, 1337 bp, Homo sapiens
  CDS (34)..(1305)
ccccgaatccccgctcccaggctacctaagaggatgagcggtgctccgacggccggggcagccctgatgctctgcgccgccaccgccgtgctactgagcgctcagggcggacccgtgcagtccaagtcgccgcgctttgcgtcctgggacgagatgaatgtcctggcgcacggactcctgcagctcggccaggggctgcgcgaacacgcggagcgcacccgcagtcagctgagcgcgctggagcggcgcctgagcgcgtgcgggtccgcctgtcagggaaccgaggggtccaccgacctcccgttagcccctgagagccgggtggaccctgaggtccttcacagcctgcagacacaactcaaggctcagaacagcaggatccagcaactcttccacaaggtggcccagcagcagcggcacctggagaagcagcacctgcgaattcagcatctgcaaagccagtttggcctcctggaccacaagcacctagaccatgaggtggccaagcctgcccgaagaaagaggctgcccgagatggcccagccagttgacccggctcacaatgtcagccgcctgcaccggctgcccagggattgccaggagctgttccaggttggggagaggcagagtggactatttgaaatccagcctcaggggtctccgccatttttggtgaactgcaagatgacctcagatggaggctggacagtaattcagaggcgccacgatggctcagtggacttcaaccggccctgggaagcctacaaggcggggtttggggatccccacggcgagttctggctgggtctggagaaggtgcatagcatcacgggggaccgcaacagccgcctggccgtgcagctgcgggactgggatggcaacgccgagttgctgcagttctccgtgcacctgggtggcgaggacacggcctatagcctgcagctcactgcacccgtggccggccagctgggcgccaccaccgtcccacccagcggcctctccgtacccttctccacttgggaccaggatcacgacctccgcagggacaagaactgcgccaagagcctctctgccccatcggtggctcaaagacctgaccatgttccctctcccctgaccccggcaggaggctggtggtttggcacctgcagccattccaacctcaacggccagtacttccgctccatcccacagcagcggcagaagcttaagaagggaatcttctggaagacctggcggggccgctactacccgctgcaggccaccaccatgttgatccagcccatggcagcagaggcagcctcctagcgtcctggctgggcctggtcccaggccca

SEQ ID NO: 244 - protein, 424 aa, Homo sapiens
MSGAPTAGAALMLCAATAVLLSAQGGPVQSKSPRFASWDEMNVLAHGLLQLGQGLREHAERTRSQLSALERRLSACGSACQGTEGSTDLPLAPESRVDPEVLHSLQTQLKAQNSRIQQLFHKVAQQQRHLEKQHLRIQHLQSQFGLLDHKHLDHEVAKPARRKRLPEMAQPVDPAHNVSRLHRLPRDCQELFQVGERQSGLFEIQPQGSPPFLVNCKMTSDGGWTVIQRRHDGSVDFNRPWEAYKAGFGDPHGEFWLGLEKVHSITGDRNSRLAVQLRDWDGNAELLQFSVHLGGEDTAYSLQLTAPVAGQLGATTVPPSGLSVPFSTWDQDHDLRRDKNCAKSLSAPSVAQRPDHVPSPLTPAGGWWFGTCSHSNLNGQYFRSIPQQRQKLKKGIFWKTWRGRYYPLQATTMLIQPMAAEAAS

SEQ ID NO: 245 - DNA, 1233 bp, Homo sapiens; identical to SEQ ID NO: 199
  CDS (10)..(1227)

SEQ ID NO: 246 - protein, 406 aa, Homo sapiens; identical to SEQ ID NO: 236

SEQ ID NO: 247 - DNA, 1747 bp, Homo sapiens
atgtacacaaactaaactactggacaacaaaaagcaatgtaatcatcacaaactaagattttcttgtgaacaccacaatccagttcattctgaggtcatccagttccagtagtcttcttgaggaaaacaccattttcctcagttcagttttcttctccttctttgatagtataaatacaccaaccactgtgcaataaaaggccatatgatggcaaacgttagcacaccaggagacatctcgaagggccaccaagatggtctctgtgaggtgggctgaggagcagtctgcaatgttgatgttgatgattttgcctgcaaagcagtcagcgtttccagtttctgcagtctctgaaggacattctgcatgtcctcctgcagtctcatcagcacgagggcgatctgctcattgaggctgcctcgggaccctctgtcggagccccagcgctccccatcacctccacttcccacctgccggcccttggttccttcgctcaagtgttgtatcctatgtcctcttcctcttctaacattagagaattcgtcagtttctccgcctcgcttctcccggtgtggtgctccgctgttattcctgccatcttctcctccatgcttgacttcaccttttccttcaactgcaaccacctgcatattcccaatgttgccatttccaggaggtacttgaatatcttcacgaaatccagaattttccatgggttgactggaatgaccacccaagtaatactgaaatggtccattgttggacgtaaagctgtctaaagactcttcttgtccaaattgttccatagaatcacagtaaacttcactgtctgaatcgcttgtcaaatgctgaattcctgtaacatcttcaacatgatcatcatttatatcttggtgaatgcaaacagcagattttccagtttgccccaagttttcatcaatgggctttacttcttcagtgcttctgccattcagggaagaactggcatgaatgtcattctgtatatcctgaacaaagccatctttatcatagccattagtgacaatgacttccaaattcttatggtctgctgacttcttcatcattttcttatcattatcactttgttctgctcctttcacttcttcttgggcctcttcttcctcagactcggctccactgtcactgctttcagctttaccattaacggttttggcgttcggagcagaagtgagaacattaccaagatctgaggttatatcagaactcctgccactctttttgtcctcgacaatttcataaaatggacctatgacacgcagcaattcttcaactttctcagtcattggcatagtttcaataatctttttcatttcttcaacatatgcaatcatggcttcctctttggtcatatcacccagtgaactccaagcatcccatttatatcttccaataggatcccaaaatccaggccttgaaagtttacagggtccttcagttgcctgcttatagaagctataaaatttaagcatcatttcatttgttggctggaatgaaccattcttcggcaaactctggatcaccttcacggccgcctcaaacctagtctcgtgcacggatctcgtgtccgccatctccagctgccagtgttggccccggtcccaaggtctgtcggcgggaatcaggcagcagcagcaccagctttcccaagagcctgcatgaaactggaacatggagcgcagccgcggatcaacatgccccaaaaggaga

SEQ ID NO: 248 - protein, 523 aa, Homo sapiens
MFQFHAGSWESWCCCCLIPADRPWDRGQHWQLEMADTRSVHETRFEAAVKVIQSLPKNGSFQPTNEMMLKFYSFYKQATEGPCKLSRPGFWDPIGRYKWDAWSSLGDMTKEEAMIAYVEEMKKIIETMPMTEKVEELLRVIGPFYEIVEDKKSGRSSDITSDLGNVLTSAPNAKTVNGKAESSDSGAESEEEEAQEEVKGAEQSDNDKKMMKKSADHKNLEVIVTNGYDKDGFVQDIQNDIHASSSLNGRSTEEVKPIDENLGQTGKSAVCIHQDINDDHVEDVTGIQHLTSDSDSEVYCDSMEQFGQEESLDSFTSNNGPFQYYLGGHSSQPMENSGFREDIQVPPGNGNIGNMQVVAVEGKGEVKHGGEDGRNNSGAPHREKRGGETDEFSNVRRGRGHRIQHLSEGTKGRQVGSGGDGERWGSDRGSRGSLNEQIALVLMRLQEDMQNVLQRLQKLETLTALQAKSSTSTLQTAPQPTSQRPSWWPFEMSPGVLTFAIIWPFIAQWLVYLYYQRRRRKLN

SEQ ID NO: 249 - DNA, 1432 bp, Homo sapiens
  CDS (1)..(1431)
aagcttgacagaccttgggaccggggccaacactggcagctggagatggcggacacgagatccgtgcacgagactaggtttgaggcggccgtgaaggtgatccagagtttgccgaagaatggttcattccagccaacaaatgaaatgatgcttaaattttatagcttctataagcaggcaactgaaggaccctgtaaactttcaaggcctggattttgggatcctattggaagatataaatgggatgcttggagttcactgggtgatatgaccaaagaggaagccatgattgcatatgttgaagaaatgaaaaagattattgaaactatgccaatgactgagaaagttgaagaattgctgcgtgtcataggtccattttatgaaattgtcgaggacaaaaagagtggcaggagttctgatataacctcagatcttggtaatgttctcacttctactccgaacgccaaaaccgttaatggtaaagctgaaagcagtgacagtggagccgagtctgaggaagaagaggcccaagaagaagtgaaaggagcagaacaaagtgataatgataagaaaatgatgaagaagtcagcagaccataagaatttggaagtcattgtcactaatggctatgataaagatggctttgttcaggatatacagaatgacattcatgccagttcttccctgaatggcagaagcactgaagaagtaaagcccattgatgaaaacttggggcaaactggaaaatctgctgtttgcattcaccaagatataaatgatgatcatgttgaagatgttacaggaattcagcatttgacaagcgattcagacagtgaagtttactgtgattctatggaacaatttggacaagaagagtctttagacagctttacgtccaacaatggaccatttcagtattacttgggtggtcattccagtcaacccatggaaaattctggatttcgtgaagatattcaagtacctcctggaaatggcaacattgggaatatgcaggtggttgcagttgaaggaaaaggtgaagtcaagcatggaggagaagatggcgggaataacagcggagcaccacaccgggagaagcgaggcggagaaactgacgaattctctaatgttagaagaggaagaggacataggatgcaacacttgagcgaaggaaccaagggccggcaggtgggaagtggaggtgatggggagcgctggggctccgacagagggtcccgaggcagcctcaacgagcagatcgccctcgtgctgatgagactgcaggaggacatgcagaatgtccttcagagactgcagaaactggaaacgctgactgctttgcaggcaaaatcatcaacatcaacattgcagactgctcctcagcccacctcacagagaccatcttggtggcccttcgagatgccctctcgag

SEQ ID NO: 250 - protein, 477 aa, Homo sapiens
KLDRPWDRGQHWQLEMADTRSVHETRFEAAVKVIQSLPKNGSFQPTNEMMLKFYSFYKQATEGPCKLSRPGFWDPIGRYKWDAWSSLGDMTKEEAMIAYVEEMKKIIETMPMTEKVEELLRVIGPFYEIVEDKKSGRSSDITSDLGNVLTSTPNAKTVNGKAESSDSGAESEEEEAQEEVKGAEQSDNDKKMMKKSADHKNLEVIVTNGYDKDGFVQDIQNDIHASSSLNGRSTEEVKPIDENLGQTGKSAVCIHQDINDDHVEDVTGIQHLTSDSDSEVYCDSMEQFGQEESLDSFTSNNGPFQYYLGGHSSQPMENSGFREDIQVPPGNGNIGNMQVVAVEGKGEVKHGGEDGGNNSGAPHREKRGGETDEFSNVRRGRGHRMQHLSEGTKGRQVGSGGDGERWGSDRGSRGSLNEQIALVLMRLQEDMQNVLQRLQKLETLTALQAKSSTSTLQTAPQPTSQRPSWWPFEMPSR

SEQ ID NO: 251 - DNA, 1401 bp, Homo sapiens
aagcttactaggtttgaggcggccgtgaaggtgatccagagtttgccgaagaatggttcattccagccaacaaatgaaatgatgcttaaattttatagcttctataagcaggcaactgaaggaccctgtaaactttcaaggcctggattttgggatcctattggaagatataaatgggatgcttggagttcactgggtgatatgaccaaaggggaagccatgattgcatatgttgaagaaatgaaaaagattattgaaactatgccaatgactgagaaagttgaagaattgctgcgtgtcataggtccattttatgaaattgtcgaggacaaaaagagtggcaggagttctgatataacctcagtccgactggagaaaatctctaaatgtttagaagatcttggtaatgttctcacttctactccgaacgccaaaaccgttaatggtaaagctgaaagcagtgacagtggagccgagtctgaggaagaagaggcccaagaagaagtgaaaggagcagaacaaagtgataatgataagaaaatgatgaagaagtcagcagaccataagaatttggaagtcattgtcactaatggctatgataaagatggctttgttcaggatatacagaatgacattcatgccagttcttccctgaatggcagaagcactgaagaagtaaagcccattgatgaaaacttggggcaaactggaaaatctgctgtttgcattcaccaagatataaatgatgatcatgttgaagatgttacaggaattcagcatttgacaagcgattcagacagtgaagtttactgtgattctatggaacaatttggacaagaagagtctttagacagctttacgtccaacaatggaccatttcagtattacttgggtggtcattccagtcaacccatggaaaattctggatttcgtgaatatattcaagtacctcctggaaatggcaacattgggaatatgcaggtggttgcagttgaaggaaaaggtgaagtcaagcatggaggagaagatggcaggaataacagcggagcaccacaccgggagaagcgaggcggagaaactgacgaattctctaatgttagaagaggaagaggacataggatgcaacacttgagcgaaggaaccaagggccggcaggtgggaagtggaggtgatggggagcgctggggctccgacagagggtcccgaggcagcctcaatgagcagatcgccctcgtgctgatgagactgcaggaggacatgcagaatgtccttcagagactgcagaaactggaaacgctgactgctttgcaggcaaaatcatcaacatcaacattgcagactgctcctcagcccacctcacagagaccatcttggtggcccttcgagatgtctcctctcgag

SEQ ID NO: 252 - protein, 466 aa, Homo sapiens
KLTRFEAAVKVIQSLPKNGSFQPTNEMMLKFYSFYKQATEGPCKLSRPGFWDPIGRYKWDAWSSLGDMTKGEAMIAYVEEMKKIIETMPMTEKVEELLRVIGPFYEIVEDKKSGRSSDITSVRLEKISKCLEDLGNVLTSTPNAKTVNGKAESSDSGAESEEEEAQEEVKGAEQSDNDKKMMKKSADHKNLEVIVTNGYDKDGFVQDIQNDIHASSSLNGRSTEEVKPIDENLGQTGKSAVCIHQDINDDHVEDVTGIQHLTSDSDSEVYCDSMEQFGQEESLDSFTSNNGPFQYYLGGHSSQPMENSGFREYIQVPPGNNIGNMQVVAVEGKGEVKHGGEDGRNNSGAPHREKRGGETDEFSNVRRGRGHRMQHLSEGTKGRQVGSGGDGERWGSDRGSRGSLNEQIALVLMRLQEDMQNVLQRLQKLETLTALQAKSSTSTLQTAPQPTSQRPSWWPFEMSPLE

SEQ ID NO: 253 - DNA, 1401 bp, Homo sapiens
aagcttactaggtttgaggcggccgtgaaggtgatccagagtttgccgaagaatggttcattccagccaacaaatgaaatgatgcttaaattttatagcttctataagcaggcaactgaaggaccctgtaaactttcaaggcctggattttgggatcctattggaagatataaatgggatgcttggagttcactgggtgatatgaccaaagaggaagccatgattgcatatgttgaagaaatgaaaaagattattgaaactatgccaatgactgagaaagttgaagaattgctgcgtgtcataggtccattttatgaaattgtcgaggacaaaaagagtggcaggagttctgatataacctcagtccgactggagaaaatctctaaatgtttagaagatcttggtaatgttctcacttctactccaaacgccaaaaccgttaatggtaaagctgaaagcagtgacagtggagccgagtctgaggaagaagaggcccaagaagaagtgaaaggagcagaacaaagtgataatgataagaaaatgatgaagaagtcagcagaccataagaatttggaagtcattgtcactaatggctatgataaagatggctttgttcaggatatacagaatgacattcatgccagttcttccctgaatggcagaagcactgaagaagtaaagcctattgatgaaaacttggggcaaactggaaaatctgctgtttgcattcaccaagatataaatgatgatcatgttgaagatgttacaggaattcagcatttgacaagcgattcagacagtgaagtttactgtgattctatggaacaatttggacaagaagagtctttagacagctttacgtccaacaatggacaatttcagtattacttgggtggtcattccagtcaacccatggaaaattctggatttcgtgaagatattcaagtacctcctggaaatggcaacattgggaatatgcaggtggttgcagttgaaggaaaaggtgaagtcaagcatggaggagaagatggcaggaataacagcggagcgccacaccgggagaagcgaggcggagaaactgatgaattctctaatgttagaagaggaagaggacataggatgcaacacttgagcgaaggaaccaagggccggcaggtgggaagtggaggtgatggggagcgctggggctccgacagagggtcccgaggcagcctcaatgagcagatcgccctcgtgctgatgagactgcaggaggacatgcagaatgtccttcagagactgcagaaactggaaacgctgactgctttgcaggcaaaatcatcaacatcaacattgcagactgctcctcagcccacctcacagagaccatcttggtggcccttcgagatgtctcctctcgag

SEQ ID NO: 254 - protein, 465 aa, Homo sapiens
KLTRFEAAVKVIQSLPKNGSFQPTNEMMLKFYSFYKQATEGPCKLSRPGFWDPIGRYKWDAWSSLGDMTKEEAMIAYVEEMKKIIETMPMTEKVEELLRVIGPFYEIVEDKKSGRSSDITSVRLEKISKCLEDLGNVLTSTPNAKTVNGKAESSDSGAESEEEAQEEVKGAEQSDNDKKMMKKSADHKNLEVIVTNGYDKDGFVQDIQNDIHASSSLNGRSTEEVKPIDENLGQTGKSAVCIHQDINDDHVEDVTGIQHLTSDSDSEVYCDSMEQFGQEESLDSFTSNNGQFQYYLGGHSSQPMENSGFREDIQVPPGNNIGNMQVVAVEGKGEVKHGGEDGRNNSGAPHREKRGGETDEFSNVRRGRGHRMQHLSEGTKGRQVGSGGDGERWGSDRGSRGSLNEQIALVLMRLQEDMQNVLQRLQKLETLTALQAKSSTSTLQTAPQPTSQRPSWWPFEMSPLE

SEQ ID NO: 255 - DNA, 1401 bp, Homo sapiens
aagcttactaggtttgaggcggccgtgaaggtgatccagagtttgccgaagaatggttcattccagccaacaaatgaaatgatgcttaaattttatagcttctataagcaggcaactgaaggaccctgtaaactttcaaggcctggattttgggatcctattggaagatataaatgggatgcttggagttcactgggtgatatgaccaaagaggaagccatgattgcatatgttgaagaaatgaaaaagattattgaaactatgccaatgactgagaaagttgaagaattgctgcgtgtcataggtccattttatgaaattgtcgaggacaaaaagagtggcaggagttctgatataacctcagtccgactggagaaaatctctaaatgtttagaagatcttggtaatgttctcacttctactccaaacgccaaaaccgttaatggtaaagctgaaagcagtgacagtggagccgagtctgaggaagaagaggcccaagaagaagtgaaaggagcagaacaaagtgataatgataagaaaatgatgaagaagtcagcagaccataagaatttggaagtcattgtcactaatggctatgataaagatggctttgttcaggatatacagaatgacattcatgccagttcttccctgaatggcagaagcactgaagaagtaaagcccattgatgaaaacttggggcaaactggaaaatctgctgtttgcattcaccaagatataaatgatgatcatgttgaagatgttacaggaattcagcatttgacaagcgattcagacagtgaagtttactgtgattctatggaacaatttggacaagaagagtctttagacagctttacgtccaacaatggaccatttcagtattacttgggtggtcattccagtcaacccatggaaaattctggatttcgtgaagatattcaagtacctcctggaaatggcaacattgggaatatgcaggtggttgcagttgaaggaaaaggtgaagtcaagcatggaggagaagatggcaggaataacagcggagcaccacaccgggagaagcgaggcggagaaactgacgaattctctaatgttagaagaggaagaggacataggatgcaacacttgagcgaaggaaccaagggccggcaggtgggaagtggaggtgatggggagcgctggggctccgacagagggtcccgaggcagcctcaatgagcagatcgccctcgtgctgatgagactgcaggaggacatgcagaatgtccttcagagactgcagaaactggaaacgctgactgctttgcaggcaaaatcatcaacatcaacattgcagactgctcctcagcccacctcacagagaccatcttggtggcccttcgagatgtctcctctcgag

SEQ ID NO: 256 - protein, 440 aa, Homo sapiens
KLTRFEAAVKVIQSLPKNGSFQPTNEMMLKFYSFYKQATEGPCKLSRPGFWDPIGRYKWDAWSSLGDMTKEEAMIAYVEEMKKIIETMPMTEKVEELLRVIGPFYEIVEDKKSGRSSDITSVRLEKISKCLEDLEEEEAQEEVKGAEQSDNDKKMMKKSADHKNLEVIVTNGYDKDGFVQDIQNDIHASSSLNGRSTEEVKPIDENLGQTGKSAVCIHQDINDDHVEDVTGIQHLTSDSDSEVYCDSMEQFGQEESLDSFTSNNGPFQYYLGGHSSQPMENSGFREDIQVPPGNNIGNMQVVAVEGKGEVKHGGEDGRNNSGAPHREKRGGETDEFSNVRRGRGHRMQHLSEGTKGRQVGSGGDGERWGSDRGSRGSLNEQIALVLMRLQEDMQNVLQRLQKLETLTALQAKSSTSTLQTAPQPTSQRPSWWPFEMSPLE

SEQ ID NO: 257 - DNA, 1368 bp, Homo sapiens
aagcttactaggtttgaggcggccgtgaaggtgatccagagtttgccgaagaatggttcattccagccaacaaatgaaatgatgcttaaattttatagcttctataagcaggcaactgaaggaccctgtaaactttcaaggcctggattttgggatcctattggaagatataaatgggatgcttggagttcactgggtgatatgaccaaagaggaagccatgattgcatatgttgaagaaatgaaaaagattattgaaactatgccaatgactgagaaagttgaagaattgctgcgtgtcataggtccattttatgaaattgtcgaggacaaaaagagtggcaggagttctgatataacctcagatcttggtaatgttctcacttctactccgaacgccaaaaccgttaatggtaaagctgaaagcagtgacagtggagccgagtctgaggaagaagaggcccaagaagaagtgaaaggagcagaacaaagtgataatgataagaaaatgatgaagaagtcagcagaccataagaatttggaagtcattgtcactaatggctatgataaagatggctttgttcaggatatacagaatgacattcatgccagttcttccctgaatggcagaagcactgaagaagtaaagcccattgatgaaaacttggggcaaactggaaaatctgctgtttgcattcaccaagatataaatgatgatcatgttgaagatgttacaggaattcagcatttgacgagcgattcagacagtgaagtttactgtgattctatggaacaatttggacaagaagagtctttagacagctttacgtccaacaatggaccatttcagtattacttgggtggtcattccagtcaacccatggaaaattctggatttcgtgaagatattcaagtacctcctggaaatggcaacattgggaatatgcaggtggttgcagttgaaggaaaaggcgaagtcaagcatggaggagaagatggcaggaataacagcggagcaccacaccgggagaagcgaggcggagaaactgacgaattctctaatgttagaagaggaagaggacataggatgcaacacttgagcgaaggaaccaagggccggcaggtgggaagtggaggtgatggggagcgctggggctccgacagagggtcccgaggcagcctcaatgagcagatcgccctcgtgctgatgagactgcaggaggacatacagaatgtccttcagagactgcagaaactggaaacgctgactgctttgcaggcaaaatcatcaacatcaacattgcagactgctcctcagcccacctcacagagatcatcttggtggcccttcgagatgtctcctctcgag

SEQ ID NO: 258 - protein, 453 aa, Homo sapiens
KLTRFEAAVKVIQSLPKNGSFQPTNEMMLKFYSFYKQATEGPCKLSRPGFWDPIGRYKWDAWSSLGDMTKEEAMIAYVEEMKKIIETMPMTEKVEELLRVIGPFYEIVEDKKSGRSSDITSDLGNVLTSTPNAKTVNGKAESSDSGAESEEEEAQEEVKGEQSDNDKKMMKKSADHKNLEVIVTNGYDKDGFVQDIQNDIHASSSLNGRSTEEVKPIDENLGQTGKSAVCIHQDINDDHEDVTGIQHLTSDSDSEVYCDSMEQFGQEESLDSFTSNNGPFQYYLGGHSSQPMENSGFREDIQVPPGNGNIGNMQVVAVGKGEVKHGGEDGRNNSGAPHREKRGGETDEFSNVRRGRGHRMQHLSEGTKGRQVGSGGDGERWGSDRGSRGSLNEQIALVLMRLQEDIQNVLQRLQKLETLTALQAKSSTSTLQTAPQPTSQRSSWWPFEMSPLE

SEQ ID NO: 259 - DNA, 1586 bp, Homo sapiens
  CDS (3)..(1586)
aagcttccaccatgttccagtttcatgcaggctcttgggaaagctggtgctgctgctgcctgattcccgccgacagaccttgggaccggggccaacactggcagctggagatggcggacacgagatccgtgcacgagactaggtttgaggcggccgtgaaggtgatccagagtttgccgaagaatggttcattccagccaacaaatgaaatgatgcttaaattttatagcttctataagcaggcaactgaaggaccctgtaaactttcaaggcctggattttgggatcctattggaagatataaatgggatgcttggagttcactgggtgatatgaccaaagaggaagccatgattgcatatgttgaagaaatgaaaaagattattgaaactatgccaatgactgagaaagttgaagaattgctgcgtgtcataggtccattttatgaaattgtcgaggacaaaaagagtggcaggagttctgatataacctcagatcttggtaatgttctcacttctactccgaacgccaaaaccgttaatggtaaagctgaaagcagtgacagtggagccgagtctgaggaagaagaggcccaagaagaagtgaaaggagcagaacaaagtgataatgataagaaaatgatgaagaagtcagcagaccataagaatttggaagtcattgtcactaatggctatgataaagatggctttgttcaggatatacagaatgacattcatgccagttcttccctgaatggcagaagcactgaagaagtaaagcccattgatgaaaacttggggcaaactggaaaatctgctgtttgcattcaccaagatataaatgatgatcatgttgaagatgttacaggaattcagcatttgacaagcgattcagacagtgaagtttactgtgattctatggaacaatttggacaagaagagtctttagacagctttacgtccaacaatggaccatttcagtattacttgggtggtcattccagtcaacccatggaaaattctggatttcgtgaagatattcaagtacctcctggaaatggcaacattgggaatatgcaggtggttgcagttgaaggaaaaggtgaagtcaagcatggaggagaagatggcaggaataacagcggagcaccacaccgggagaagcgaggcggagaaactgacgaattctctaatgttagaagaggaagaggacataggatgcaacacttgagcgaaggaaccaagggccggcaggtgggaagtggaggtgatggggagcgctggggctccgacagagggtcccgaggcagcctcaatgagcagatcgccctcgtgctgatgagactgcaggaggacatgcagaatgtccttcagagactgcagaaactggaaacgctgactgctttgcaggcaaaatcatcaacatcaacattgcagactgctcctcagcccacctcacagagaccatcttggtggcccttcgagatgtctcctggtgtgctaacgtttgccatcatatggccttttattgcacagtggttggtgtatttatactatcaaagaaggagaagaaaactgaacctcgag

SEQ ID NO: 260 - protein, 528 aa, Homo sapiens
ASTMFQFHAGSWESWCCCCLIPADRPWDRGQHWQLEMADTRSVHETRFEAAVKVIQSLPKNGSFQPTNEMMLKFYSFYKQATEGPCKLSRPGFWDPIGRYKWDAWSSLGDMTKEEAMIAYVEEMKKIIETMPMTEKVEELLRVIGPFYEIVEDKKSGRSSDITSDLGNVLTSTPNAKTVNGKAESSDSGAESEEEEAQEEVKGAEQSDNDKKMMKKSADHKNLEVIVTNGYDKDGFVQDIQNDIHASSSLNGRSTEEVKPIDENLGQTGKSAVCIHQDINDDHVEDVTGIQHLTSDSDSEVYCDSMEQFGQEESLDSFTSNNGPFQYYLGGHSSQPMENSGFREDIQVPPGNGNIGNMQVVAVEGKGEVKHGGEDGRNNSGAPHREKRGGETDEFSNVRRGRGHRMQHLSEGTKGRQVGSGGDGERWGSDRGSRGSLNEQIALVLMRLQEDMQNVLQRLQKLETLTALQAKSSTSTLQTAPQPTSQRPSWWPFEMSPGVLTFAIIWPFIAQWLVYLYYQRRRRKLNLE

SEQ ID NO: 261 - DNA, 1618 bp, Homo sapiens
  CDS (2)..(1618)
aagcttccaccatgttccagtttcatgcaggctcttgggaaagctggtgctgctgctgcctgattccgccgacagaccttgggaccggggccaacactggcagctggagatggcggacacgagatccgtgcacgagactaggtttgaggcggccgtgaaggtgatccagagtttgccgaagaatggttcattccagccaacaaatgaaatgatgcttaaattttatagcttctataagcaggcaactgaaggaccctgtaaactttcaaggcctggattttgggatcctattggaagatataaatgggatgcttggagttcactgggtgatatgaccaaagaggaagccatgattgcatatgttgaagaaatgaaaaagattattgaaactatgccaatgactgagaaagttgaagaattgctgcgtgtcataggtccattttatgaaattgtcgaggacaaaaagagtggcaggagttctgatataacctcagtccgactggagaaaatctctaaatgtttagaagatcttggtaatgttctcacttctactccaaacgccaaaaccgttaatggtaaagctgaaggcagtgacagtggagccgagtctgaggaagaagaggcccaagaagaagtgaaaggagcagaacaaagtgataatgataagaaaatgatgaagaagtcagcagaccataagaatttggaagtcattgtcactaatggctatgataaagatggctttgttcaggatatacagaatgacattcatgccagttcttccctgaatggcagaagcactgaagaagtaaagcccattgatgaaaacttggggcaaactggaaaatctgctgtttgcattcaccaagatataaatgatgatcatgttgaagatgttacaggaattcagcatttgacaagcgattcagacagtgaagtttactgtgattctatggaacaatttggacaagaagagtctttagacagctttacgtccaacaatggaccatttcagtattacttgggtggtcattccagtcaacccatggaaaattctggatttcgtgaagatattcaagtacctcctggaaatggcaacattgggaatatgcaggtggttgcagttgaaggaaaaggtgaagtcaagcatggaggagaagatggcaggaataacagcggagcaccacaccgggagaagcgaggcggagaaactgacgaattctctaatgttagaagaggaagaggacataggatgcaacacttgagcgaaggaaccaagggccggcaggtgggaagtggaggtgatggggagcgctggggctccgacagagggtcccgaggcagcctcaatgagcagatcgccctcgtgctgatgagactgcaggaggacatgcagaatgtccttcagagactgcagaaactggaaacgctgactgctttgcaggcaaaatcatcaacatcaacattgcagactgctcctcagcccacctcacagagaccatcttggtggcccttcgagatgtctcctggtgtgctaacgtttgccatcatatggccttttattgcacagtggttggtgtatttatactatcaaagaaggagaagaaaactgaacctcgag

SEQ ID NO: 262 - protein, 539 aa, Homo sapiens
SFHHVPVSCRLLGKLVLLLPDSADRPWDRGQHWQLEMADTRSVHETRFEAAVKVIQSLPKNGSFQPTNEMMLKFYSFYKQATEGPCKLSRPGFWDPIGRYKWDAWSSLGDMTKEEAMIAYVEEMKKIIETMPMTEKVEELLRVIGPFYEIVEDKKSGRSSDITSVRLEKISKCLEDLGNVLTSTPNAKTVNGKAEGSDSGAESEEEEAQEEVKGAEQSDNDKKMMKKSADHKNLEVIVTNGYDKDGFVQDIQNDIHASSSLNGRSTEEVKPIDENLGQTGKSAVCIHQDINDDHVEDVTGIQHLTSDSDSEVYCDSMEQFGQEESLDSFTSNNGPFQYYLGGHSSQPMENSGFREDIQVPPGNGNIGNMQVVAVEGKGEVKHGGEDGRNNSGAPHREKRGGETDEFSNVRRGRGHRMQHLSEGTKGRQVGSGGDGERWGSDRGSRGSLNEQIALVLMRLQEDMQNVLQRLQKLETLTALQAKSSTSTLQTAPQPTSQRPSWWPFEMSPGVLTFAIIWPFIAQWLVYLYYQRRRRKLNLE

SEQ ID NO: 263 - DNA, 1586 bp, Homo sapiens
  CDS (3)..(1586)
aagcttccaccatgttccagtttcatgcaggctcttgggaaagctggtgctgctgctgcctgattcccgccgacagaccttgggaccggggccaacactggcagctggagatggcggacacgagatccgtgcacgagactaggtttgaggcggccgtgaaggtgatccagagtttgccgaagaatggttcattccagccaacaaatgaaatgatgcttaaattttatagcttctataagcaggcaactgaaggaccctgtaaactttcaaggcctggattttgggatcctattggaagatataaatgggatgcttggagttcactgggtgatatgaccaaagaggaagccatgattgcatatgttgaagaaatgaaaaagattattgaaactatgccaatgactgagaaagttgaagaattgctgcgtgtcataggtccattttatgaaattgtcgaggacaaaaagagtggcaggagttctgatataacctcagatcttggtaatgttctcacttctactccgaacgccaaaaccgttaatggtaaagctgaaagcagtgacagtggagccgagtctgaggaagaagaggcccaagaagaagtgaaaggagcagaacaaagtgataatgataagaaaatgatgaagaagtcagcagaccataagaatttggaagtcattgtcactaatggctatgataaagatggctttgttcaggatatacagaatgacattcatgccagttcttccctgaatggcagaagcactgaagaagtaaagcccattgatgaaaacttggggcaaactggaaaatctgctgtttgcattcaccaagatataaatgatgatcatgttgaagatgttacaggaattcagcatttgacaagcgattcagacagtgaagtttactgtgattctatggaacaatttggacaagaagagtctttagacagctttacgtccaacaatggaccatttcagtattacttgggtggtcattccagtcaacccatggaaaattctggatttcgtgaagatattcaagtacctcctggaaatggcaacattgggaatatgcaggtggttgcagttgaaggaaaaggtgaagtcaagcatggaggagaagatggcaggaataacagcggagcaccacaccgggagaagcgaggcggagaaactgacgaattctctaatgttagaagaggaagaggacataggatgcaacacttgagcgaaggaaccaagggccggcaggtgggaagtggaggtgatggggggcgctggggctccgacagagggtcccgaggcagcctcaatgagcagatcgccctcgtgctgatgagactgcaggaggacatgcagaatgtccttcagagactgcagaaactggaaacgctgactgctttgcgggcaaaatcatcaacatcaacattgcagactgctcctcagcccacctcacagagaccatcttggtggcccttcgagatgtctcctggtgtgctaacgtttgccatcatatggccttttattgcacagtggttggtgtatttatactatcaaagaaggagaagaaaactgaacctcgag

SEQ ID NO: 264 - protein, 528 aa, Homo sapiens
ASTMFQFHAGSWESWCCCCLIPADRPWDRGQHWQLEMADTRSVHETRFEAAVKVIQSLPKNGSFQPTNEMMLKFYSFYKQATEGPCKLSRPGFWDPIGRYKWDAWSSLGDMTKEEAMIAYVEEMKKIIETMPMTEKVEELLRVIGPFYEIVEDKKSGRSSDITSDLGNVLTSTPNAKTVNGKAESSDSGAESEEEEAQEEVKGAEQSDNDKKMMKKSADHKNLEVIVTNGYDKDGFVQDIQNDIHASSSLNGRSTEEVKPIDENLGQTGKSAVCIHQDINDDHVEDVTGIQHLTSDSDSEVYCDSMEQFGQEESLDSFTSNNGPFQYYLGGHSSQPMENSGFREDIQVPPGNGNIGNMQVVAVEGKGEVKHGGEDGRNNSGAPHREKRGGETDEFSNVRRGRGHRMQHLSEGTKGRQVGSGGDGGRWGSDRGSRGSLNEQIALVLMRLQEDMQNVLQRLQKLETLTALRAKSSTSTLQTAPQPTSQRPSWWPFEMSPGVLTFAIIWPFIAQWLVYLYYQRRRRKLNLE

SEQ ID NO: 265 - DNA, 1517 bp, Homo sapiens
  CDS (3)..(1517)
aagcttccaccatgttccagtttcatgcaggctcttgggaaagctggtgctgctgctgcctgattcccgccgacagaccttgggaccggggccaacactggcagctggagatggtggacacgagatccgtgcacgagactaggtttgaggcggccgtgaaggtgatccagagtttgccgaagaatggttcattccagccaacaaatgaaatgatgcttaaattttatagcttctataagcaggcaactgaaggaccctgtaaactttcaaggcctggattttgggatcctattggaagatataaatgggatgcttggagttcactgggtgatatgaccaaagaggaagccatgattgcatatgttgaagaagtgaaaaagattattgaaactatgccaatgactgagaaagttgaagaattgctgcgtgtcataggtccattttatgaaattgtcgaggacaaaaagagtggcaggagttctgatataacctcagatcttggtaatgttctcacttctacgccaaacgccaaaaccgttaatggtaaagctgaaagcagtgacagtggagccgagtctgaggaagaagaggcccaagaagaagtgaaaggagcagaacaaagtgataatgataagaaaatgatgaagaagtcagcagaccataagaatttggaagtcattgtcactaatggctatgataaagatggctttgttcaggatatacagaatgacattcatgccagttcttccctgaatggcagaagcactgaagaagtaaagcccattgatgaaaacttggggcaaactggaaaatctgctgtttgcattcaccaagatataaatgatgatcatgttgaagatgttacaggaattcagcatttgacaagcgattcagacagtgaagtttactgtgattctatggaacaatttggacaagaagagtctttagacagctttacgtccaacaatggaccatttcagtattacttgggtggtcattccagtcaacccatggaaaattctggatttcgtgaagatattcaagtacctcctggaaatggcaggaataacagcggagcaccacaccgggagaagcgaggcggagaaactgacgaattctctaatgttagaagaggaagaggacataggatgcaacacttgagcgaaggaaccaagggccggcaggtgggaagtggaggtgatggggagcgctggggctccgacagagggtcccgaggcagcctcaatgagcagatcgccctcgtgctgatgagactgcaggaggacatgcagaatgtccttcagagactgcagaaactggaaacgctgactgctttgcaggcaaaatcatcaacatcaacattgcagactgctcctcagcccacctcacagagaccatcttggtggcccttcgagatgtctcctggtgtgctaacgtttgccatcatatggccttttattgcacagtggttggtgtatttatactatcaaagaaggagaagaaaactgaacctcgag

SEQ ID NO: 266 - protein, 505 aa, Homo sapiens
ASTMFQFHAGSWESWCCCCLIPADRPWDRGQHWQLEMVDTRSVHETRFEAAVKVIQSLPKNGSFQPTNEMMLKFYSFYKQATEGPCKLSRPGFWDPIGRYKWDAWSSLGDMTKEEAMIAYVEEVKKIIETMPMTEKVEELLRVIGPFYEIVEDKKSGRSSDITSDLGNVLTSTPNAKTVNGKAESSDSGAESEEEEAQEEVKGAEQSDNDKKMMKKSADHKNLEVIVTNGYDKDGFVQDIQNDIHASSSLNGRSTEEVKPIDENLGQTGKSAVCIHQDINDDHVEDVTGIQHLTSDSDSEVYCDSMEQFGQEESLDSFTSNNGPFQYYLGGHSSQPMENSGFREDIQVPPGNGRNNSGAPHREKRGGETDEFSNVRRGRGHRMQHLSEGTKGRQVGSGGDGERWGSDRGSRGSLNEQIALVLMRLQEDMQNVLQRLQKLETLTALQAKSSTSTLQTAPQPTSQRPSWWPFEMSPGVLTFAIIWPFIAQWLVYLYYQRRRRKLNLE

SEQ ID NO: 267 - DNA, 1361 bp, Homo sapiens
aagcttccaccatgttccagtttcatgcaggctcttgggaaagctggtgctgctgctgcctgattcccgccgacagaccttgggaccggggccaacactggcagctggagatggcggacacgagatccgtgcacgagactaggtttgaggcggccgtgaaggtgatccagagtttgccgaagaatggttcattccagccaacaaatgaaatgatgcttaaattttatagcttctataagcaggcaactgaaggaccctgtaaactttcaaggcctggattttgggatcctattggaagatataaatgggatgcttggagttcactgggtgatatgaccaaagaggaagccatgattgcatatgttgaagaaatgaaaaagattattgaaactatgccaatgactgagaaagttgaagaattgctgcgtgtcataggtccattttatgaaattgtcgaggacaaaaagagtggcaggagttctgatataacctcagtccgactggagaaaatctctaaatgtttagaagctgaaagcagtgacagtggagccgagtctgaggaagaagaggcccaagaagaagtgaaaggagcagaacaaagtgataatgatataaatgatgatcatgttgaagatgttacaggaattcagcatttgacaagcgattcagacagtgaagtttactgtgattctatggaacaatttggacaagaagagtctttagacagctttacgtccaacaatggaccatttcagtattacttgggtggtcattccagtcaacccatggaaaattctggatttcgtgaagatattcaagtacctcctggaaatggcaacattgggaatatgcaggtggttgcagttgaaggaaaaggtgaagtcaagcatggaggagaagatggcaggaataacagcggagcgccacaccgggagaagcgaggcggagaaactgatgaattctctaatgttagaagaggaagaggacataggatgcaacacttgagcgaaggaaccaagggccggcaggtgggaagtggaggtgatggggagcgctggggctccgacagagggtcccgaggcagcctcaatgagcagatcgccctcgtgctgatgagactgcaggaggacatgcagaatgtccttcagagactgcagaaactggaaacgctgactgctttgcaggcaaaatcatcaacatcaacattgcagactgctcctcagcccacctcacagagaccatcttggtggcccttcgagatgtctcctggtgtgctaacgtttgccatcatatggccttttattgcacagtggttggcgtatttatactatcaaagaaggagaagaaaactgaacctcgag

SEQ ID NO: 268 - protein, 454 aa, Homo sapiens
ASTMFQFHAGSWESWCCCCLIPADRPWDRGQHWQLEMADTRSVHETRFEAAVKVIQSLPKNGSFQPTNEMMLKFYSFYKQATEGPCKLSRPGFWDPIGRYKWDAWSSLGDMTKEEAMIAYVEEMKKIIETMPMTEKVEELLRVIGPFYEIVEDKKSGRSSDITSVRLEKISKCLEAESSDSGAESEEEEAQEEVKGAEQSDNDINDDHVEDVTGIQHLTSDSDSEVYCDSMEQFGQEESLDSFTSNNGPFQYYLGGHSSQPMENSGFREDIQVPPGNGNIGNMQVVAVEGKGEVKHGGEDGRNNSGAPHREKRGGETDEFSNVRRGRGHRMQHLSEGTKGRQVGSGGDGERWGSDRGSRGSLNEQIALVLMRLQEDMQNVLQRLQKLETLTALQAKSSTSTLQTAPQPTSQRPSWWPFEMSPGVLTFAIIWPFIAQWLAYLYYQRRRRKLNLEG

SEQ ID NO: 269 - DNA, 1619 bp, Homo sapiens
aagcttccaccatgttccagtttcatgcaggctcttgggaaagctggtgctgctgctgcctgattcccgccgacaggccttgggaccggggccaacactggcagctggagatggcggacacgagatccgtgcacgagactaggtttgaggcggccgtgaaggtgatccagagtttgccgaagaatggttcattccagccaacaaatgaaatgatgcttaaattttatagcttctataagcaggcaactgaaggaccctgtaaactttcaaggcctggattttgggatcctattggaagatataaatgggatgcttggagttcactgggtgatatgaccaaagaggaagccataattgcatatgttgaagaaatgaaaaagattattgaaactatgccaatgactgagaaagttgaagaattgctgcgtgtcataggtccattttatgaaattgtcgaggacaaaaagagtggcaggagttctgatataacctcagtccgactggagaaaatctctaaatgtttagaagatcttggtaatgttctcacttctactccgaacgccaaaaccgttaatggtaaagctgaaagcagtgacagtggagccgagtctgaggaagaagaggcccaagaagaagtgaaaggagcagaacaaagtgataatgataagaaaatgatgaagaagtcagcagaccataagaatttggaagtcattgtcactaatggctatgataaagatggctttgttcaggatatacagaatgacattcatgccagttcttccctgaatggcagaagcactgaagaagtaaagcccattgatgaaaacttggggcaaactggaaaatctgctgtttgcattcaccaagatataaatgatgatcatgttgaagatgttacaggaattcagcatttgacaagcgattcagacagtgaagtttactgtgattctatggaacaatttggacaagaagagtctttagacagctttacgtccaacaatggaccatttcagtattacttgggtggtcattccagtcaacccatggaaaattctggatttcgtgaagatattcaagtacctcctggaaatggcaacattgggaatatgcaggttgttgcagttgaaggaaaaggcgaagtcaagcatggaggagaagatggcaggaataacagcggagcaccacaccgggaggagcgaggcggagaaactgacgaattctctaatgttagaagaggaagaggacataggatgcaacacttgagcgaaggaaccaagggccggcaggtgggaagtggaggtgatggggagcgctggggctccgacagagggtcccgaggcagcctcaatgagcatatcgccctcgtgctgatgagactgcaggaggacatgcagaatgtccttcagagactgcagaaactggaaacgctgactgctttgcaggcaaaatcatcaacatcaacattgcagactgctcctcagcccacctcacagagaccatcttggtggcccttcgagatgtctcctggtgtgctaacgtttgccatcatatggccttttattgcacagtggttggtgtatttatactatcaaagaaggagaagaaaactgaacctcgag

SEQ ID NO: 270 - protein, 537 aa, Homo sapiens
ASTMFQFHAGSWESWCCCCLIPADRPWDRGQHWQLEMADTRSVHETRFEAAVKVIQSLPKNGSFQPTNEMMLKFYSFYKQATEGPCKLSRPGFWDPIGRYKWDAWSSLGDMTKEEAIIAYVEEMKKIIETMPMTEKVEELLRVIGPFYEIVEDKKSGRSSDITSVRLEKISKCLEDLGNVLTSTPNKTVNGKAESSDSGAESEEEEAQEEVKGAEQSDNDKKMMKKSADHKNLEVIVTNGYDKDGFVQDIQNDIHASSSLNGRSTEEVKPIDENLGQTGKSAVCIHQDINDDHVEDVTGIQHLTSDSDSEVYCDSMEQFGQEESLDSFTSNNGPFQYYLGGHSSQMENSGFREDIQVPPGNGNIGNMQVVAVEGKGEVKHGGEDGRNNSGAPHREERGGETDEFSNVRRGRGHRMQHLSEGTKGRQVGSGGDGERWGSDRGSRGSLNEHIALVLMRLQEDMQNVLQRLQKLETLTALQAKSSTSTLQTAPQPTSQRPSWWPFEMSPGVLTFAIIWPFIAQWLVYLYYQRRRRKLNLE

SEQ ID NO: 271 - DNA, 1619 bp, Homo sapiens
aagcttccaccatgttccagtttcatgcaggctcttgggaaagctggtgctgctgctgcctgattcccgccgacagaccttgggaccggggccaacactggcagctggagatggcggacacgagatccgtgcacgagactaggtttgaggcggccgtgaaggtgatccagagtttgccgaagaatggttcattccagccaacaaatgaagtgatgcttaaattttatagcttctataagcaggcaactgaaggaccctgtaaactttcaaggcctggattttgggatcctattggaagatataaatgggatgcttggagttcactgggtgatatgaccaaagaggaagccatgattgcatatgttgaagaaatgaaaaagattattgaaactatgccaatgactgagaaagttgaagaattgctgcgtgtcataggtccattttatgaaattgtcgaggacaaaaagagtggcaggagttctgatataacctcagtccgactggagaaaatctctaaatgtttagaagatcttggtaatgttctcacttctactccaaacgccaaaaccgttaatggtaaagctgaaagcagtgacagtggagccgagtctgaggaagaagaggcccaagaagaagtgaaaggagcagaacaaagtgataatgataagaaaatgatgaagaagtcagcagaccataagaatttggaagtcattgtcactaatggctatgataaagatggctttgttcaggatatacagaatgacattcatgccagttcttccctgaatggcagaagcactgaagaagtaaagcctattgatgaaaacttggggcaaactggaaaatctgctgtttgcattcaccaagatataaatgatgatcatgttgaagatgttacaggaattcagcatttgacaagcgattcagacagtgaagtttactgtgattctatggaacaatttggacaagaagagtctttagacagctttacgtccaacaatggaccatttcagtattacttgggtggtcattccagtcaacccatggaaaattctggatttcgtgaagatattcaagtacctcctggaaatggcaacattgggaatatgcaggtggttgcagttgaaggaaaaggtgaagtcaagcatggaggagaagatggcaggaataacagcggagcgccacaccgggagaagcgaggcggagaaactgatgaattctctaatgttagaagaggaagaggacataggatgcaacacttgagcgaaggaaccaagggccggcaggtgggaagtggagatgatggggagcgctggggctccgacagagggtcccgaggcagcctcaatgagcagatcgccctcgtgctgatgagactgcaggaggacatgcagaatgtccttcagagactgcagaaactggaaacgctgactgctttgcaggcaaaatcatcaacatcaacattgcagactgctcctcagcccacctcacagagaccatcttggtggcccttcgagatgtctcctggtgtgctaacgtttgccatcatatggccttttattgcacagtggttggtgtatttatactatcaaagaaggagaagaaaactgaacctcgag

SEQ ID NO: 272 - protein, 538 aa, Homo sapiens
ASTMFQFHAGSWESWCCCCLIPADRPDRGQHWQLEMADTRSVHETRFEAAVKVIQSLPKNGSFQPTNEVMLKFYSFYKQATEGPCKLSRPGFWDPIGRYKWDAWSSLGDMTKEEAMIAYVEEMKKIIETMPMTEKVEELLRVIGPFYEIVEDKKSGRSSDITSVRLEKISKCLEDLGNVLTSTPNAKTVNGKAESSDSGAESEEEEAQEEVKGAEQSDNDKKMMKKSADHKNLEVIVTNGYDKDGFVQDIQNDIHASSSLNGRSTEEVKPIDENLGQTGKSAVCIHQDINDDHVEDVTGIQHLTSDSDSEVYCDSMEQFGQEESLDSFTSNNGPFQYYLGGHSSQPMENSGFREDIQVPPGNGNIGNMQVVAVEGKGEVKHGGEDGRNNSGAPHREKRGGETDEFSNVRRGRGHRMQHLSEGTKGRQVGSGDDGERWGSDRGSRGSLNEQIALVLMRLQEDMQNVLQRLQKLETLTALQAKSSTSTLQTAPQPTSQRPSWWPFEMSPGVLTFAIIWPFIAQWLVYLYYQRRRRKLNLE

SEQ ID NO: 273 - DNA, 1619 bp, Homo sapiens
aagcttccaccatgttccagtttcatgcaggctcttgggaaagctggtgctgctgctgcctgattcccgccgacagaccttgggaccggggccaacactggcagctggagatggcggacacgagatccgtgcacgagactaggtttgaggcggccgtgaaggtgatccagagtttgccgaagaatggttcattccagccaacaaatgaaatgatgcttaaattttatagcttctataagcaggcaactgaaggaccctgtaaactttcaaggcctggattttgggatcctattggaagatataaatgggatgcttggagttcactgggtgatatgaccaaagaggaagccatgattgcatatgttgaagaaatgaaaaagattattgaaactatgccaatgactgagaaagttgaagaattgctgcgtgtcataggtccattttatgaaattgtcgaggacaaaaagagtggcaggagttctgatataacctcagtccgactggagaaaatctctaaatgtttagaagatcttggtaatgttctcacttctactccaaacgccaaaaccgttaatggtaaagctgaaagcagtgacagtggagccgagtctgaggaagaagaggcccaagaagaagtgaaaggagcagaacaaagtgataatgataagaaaatgatgaagaagtcagcagaccataagaatttggaagtcattgtcactaatggctatgataaagatggctttgttcaggatatgcagaatgacattcatgccagttcttccctgaatggcagaagcactgaagaagtaaggcctattgatgaaaacttggggcaaactggaaaatctgctgtttgcattcaccaagatataaatgacgatcatgttgaagatgttacaggaattcagcatttgacaagcgattcagacagtgaagtttactgtgattctatggaacaatttggacaagaagagtctttagacagctttacgtccaacaatggaccatttcagtattacttgggtggtcattccagtcaacccatggaaaattctggatttcgtgaagatattcaagtacctcctggaaatggcaacattgggaatatgcaggtggttgcagttgaaggaaaaggtgaagtcaagcatggaggagaagatggcaggaataacagcggagcgccacaccgggagaagcgaggcggagaaactgatgaattctctaatgttagaagaggaagaggacataggatgcaacacttgagcgaaggaaccaagggccggcaggtgggaagtggaggtgatggggagcgctggggctccgacagagggtcccgaggcagcctcaatgagcagatcgccctcgtgctgatgagactgcaggaggacatgcagaatgtccttcagagactgcagaaactggaaacgctgactgctttgcaggcaaaatcatcaacatcaacattgcagactgctcctcagcccacctcacagagaccatcttggtggcccttcgagatgtctcctggtgtgctaacgtttgccatcatatggccttttattgcacagtggttggtgtatttatactatcaaagaaggagaagaaaactgaacctcgag

SEQ ID NO: 274 - protein, 538 aa, Homo sapiens
ASTMFQFHAGSWESWCCCCLIPADRPDRGQHWQLEMADTRSVHETRFEAAVKVIQSLPKNGSFQPTNEMMLKFYSFYKQATEGPCKLSRPGFWDPIGRYKWDAWSSLGDMTKEEAMIAYVEEMKKIIETMPMTEKVEELLRVIGPFYEIVEDKKSGRSSDITSVRLEKISKCLEDLGNVLTSTPNAKTVNGKAESSDSGAESEEEEAQEEVKGAEQSDNDKKMMKKSADHKNLEVIVTNGYDKDGFVQDMQNDIHASSSLNGRSTEEVRPIDENLGQTGKSAVCIHQDINDDHVEDVTGIQHLTSDSDSEVYCDSMEQFGQEESLDSFTSNNGPFQYYLGGHSSQPMENSGFREDIQVPPGNGNIGNMQVVAVEGKGEVKHGGEDGRNNSGAPHREKRGGETDEFSNVRRGRGHRMQHLSEGTKGRQVGSGGDGERWGSDRGSRGSLNEQIALVLMRLQEDMQNVLQRLQKLETLTALQAKSSTSTLQTAPQPTSQRPSWWPFEMSPGVLTFAIIWPFIAQWLVYLYYQRRRRKLNLE

SEQ ID NO: 275 - DNA, 1619 bp, Homo sapiens
  CDS (3)..(1619)
aagcttccaccatgttccagtttcatgcaggctcttgggaaagctggtgctgctgctgcctgattcccgccgacagaccttgggaccggggccaacactggcagctggagatggcggacacgagatccgtgcacgagactaggtttgaggcggccgtgaaggtgatccagagtttgccgaagaatggttcattccagccaacaaatgaaatgatgcttaaattttatagcttctataagcaggcaactgaaggaccctgtaaactttcaaggcctggattttgggatcctattggaagatataaatgggatgcttggagttcactgggtgatatgaccaaagaggaagccatgattgcatatgttgaagaaatgaaaaagattattgaaactatgccaatgactgagaaagttgaagaattgctgcgtgtcataggtccattttatgaaattgtcgaggacaaaaagagtggcaggagttctgatataacctcagtccgactggagaaaatctctaaatgtttagaagatcttggtaatgttctcacttctactccgaacgccaaaaccgttaatggtaaagctgaaagcagtgacagtggagccgagtctgaggaagaagaggcccaagaagaagtgaaaggagcagaacaaagtgataatgataagaaaatgatgaagaagtcagcagaccataagaatttggaagtcattgtcactaatggctatgataaagatggctttgttcaggatatacagaatgacattcatgccagttcttccctgaatggcagaagcactgaagaagtaaagcccattgatgaaaacttggggcaaactggaaaatctgctgtttgcattcaccaagatataaatgatgatcatgttgaagatgttacaggaattcagcatttgacaagcgattcagacagtgaagtttactgtgattctatggaacaatttggacaagaagagtctttagacagctttacgtccaacaatggaccatttcagtattacttgggtggtcattccagtcaacccatggaaaattctggatttcgtgaagatattcaagtacctcctggaaatggcaacattgggaatatgcaggtggttgcagttgaaggaaaaggtgaagtcaagcatggaggagaagagggcaggaataacagcggagcaccacaccgggagaagcgaggcggagaaactgacgaattctctaatgttagaagaggaagaggacataggatgcaacacctgagcgaaggaaccaagggccggcaggtgggaagtggaggtgatggggagcgctggggctccgacagagggtcccgaggcagcctcaatgagcagatcgccctcgtgctgatgagactgcaggaggacatgcagaatgtccttcagagactgcagaaactggaaacgctgactgctttgcaggcaaaatcatcaacatcaacattgcagactgctcctcagcccacctcacagagaccatcttggtggcccttcgagatgtctcctggtgtgctaacgtttgccatcatatggccttttattgcacagtggttggtgtatttatactatcaaagaaggagaagaaaactgaacctcgag

SEQ ID NO: 276 - protein, 539 aa, Homo sapiens
ASTMFQFHAGSWESWCCCCLIPADRPWDRGQHWQLEMADTRSVHETRFEAAVKVIQSLPKNGSFQPTNEMMLKFYSFYKQATEGPCKLSRPGFWDPIGRYKWDAWSSLGDMTKEEAMIAYVEEMKKIIETMPMTEKVEELLRVIGPFYEIVEDKKSGRSSDITSVRLEKISKCLEDLGNVLTSTPNAKTVNGKAESSDSGAESEEEEAQEEVKGAEQSDNDKKMMKKSADHKNLEVIVTNGYDKDGFVQDIQNDIHASSSLNGRSTEEVKPIDENLGQTGKSAVCIHQDINDDHVEDVTGIQHLTSDSDSEVYCDSMEQFGQEESLDSFTSNNGPFQYYLGGHSSQPMENSGFREDIQVPPGNGNIGNMQVVAVEGKGEVKHGGEEGRNNSGAPHREKRGGETDEFSNVRRGRGHRMQHLSEGTKGRQVGSGGDGERWGSDRGSRGSLNEQIALVLMRLQEDMQNVLQRLQKLETLTALQAKSSTSTLQTAPQPTSQRPSWWPFEMSPGVLTFAIIWPFIAQWLVYLYYQRRRRKLNLE

SEQ ID NO: 277 - DNA, 1619 bp, Homo sapiens
  CDS (3)..(1619)
aagcttccaccatgttccagtttcatgcaggctcttgggaaagctggtgctgctgctgcctgattcccgccgacagaccttgggaccggggccaacactggcagctggagatggcggacacgagatccgtgcacgagactaggtttgaggcggccgtgaaggtgatccagagtttgccgaagaatggttcattccagccaacaaatgaaatgatgcttaaattttatagcttctataagcaggcaactgaaggaccctgtaaactttcaaggcctggattttgggatcctattggaagatataaatgggatgcttggagttcactgggtgatatgaccaaagaggaagccatgattgcatatgttgaagaaatgaaaaagattattgaaactatgccaatgactgagaaagttgaagaattgctgcgtgtcataggtccattttatgaaattgtcgaggacaaaaagagtggcaggagttctgatataacctcagtccgactggagaaaatctctaaatgtttagaagatcttggtaatgttctcacttctactccgaacgccaaaaccgttaatggtaaagctgaaagcagtgacagtggagccgagtctgaggaagaagaggcccaagaagaagtgaaaggagcagaacaaagtgataatgataagaaaatgatgaagaagtcagcagaccataagaatttggaagtcattgtcactaatggctatgataaagatggctttgttcaggatatacagaatgacattcatgccagttcttccctgaatggcagaagcactgaagaagtaaagcccattgatgaaaacttggggcaaactggaaaatctgctgtttgcattcaccaagatataaatgatgatcatgttgaagatgttacaggaattcagcatttgacaagcgattcagacagtgaagtttactgtgattctatggaacaatttggacaagaagagtctttagacagctttacgtccaacaatggaccatttcagtattacttgggtggtcattccagtcaacccatggaaaattctggatttcgtgaagatattcaagtacctcctggaaatggcaacattgggaatatgcaggtggttgcagttgaaggaaaaggtgaagtcaagcatggaggagaagatggcaggaataacagcggagcaccacaccgggagaagcgaggcggagaaactgacgaattctctaatgttagaagaggaagaggacataggatgcaacacttgagcgaaggaaccaagggccggcaggtgggaagtggaggtgatggggagcgctggggctccgacagagggtcccgaggcagcctcaatgagcagatcgccctcgtgctgatgagactgcaggaggacatgcagaatgtccttcagagactgcagaaactggaaacgctgactgctttgcaggcaaaatcatcaacatcaacattgcagactgctcctcagcccacctcacagagaccatcttggtggcccttcgagatgtctcctggtgtgctaacgtttgccatcatatggccttttattgcacagtggttggtgtatttatactatcaaagaaggagaagaaaactgaacctcgag

SEQ ID NO: 278 - protein, 539 aa, Homo sapiens
ASTMFQFHAGSWESWCCCCLIPADRPWDRGQHWQLEMADTRSVHETRFEAAVKVIQSLPKNGSFQPTNEMMLKFYSFYKQATEGPCKLSRPGFWDPIGRYKWDAWSSLGDMTKEEAMIAYVEEMKKIIETMPMTEKVEELLRVIGPFYEIVEDKKSGRSSDITSVRLEKISKCLEDLGNVLTSTPNAKTVNGKAESSDSGAESEEEEAQEEVKGAEQSDNDKKMMKKSADHKNLEVIVTNGYDKDGFVQDIQNDIHASSSLNGRSTEEVKPIDENLGQTGKSAVCIHQDINDDHVEDVTGIQHLTSDSDSEVYCDSMEQFGQEESLDSFTSNNGPFQYYLGGHSSQPMENSGFREDIQVPPGNGNIGNMQVVAVEGKGEVKHGGEDGRNNSGAPHREKRGGETDEFSNVRRGRGHRMQHLSEGTKGRQVGSGGDGERWGSDRGSRGSLNEQIALVLMRLQEDMQNVLQRLQKLETLTALQAKSSTSTLQTAPQPTSQRPSWWPFEMSPGVLTFAIIWPFIAQWLVYLYYQRRRRKLNLE

SEQ ID NO: 279 - DNA, 1586 bp, Homo sapiens
  CDS (3)..(1586)
aagcttccaccatgttccagtttcatgcaggctcttgggaaagctggtgctgctgctgcctgattcccgccgacagaccttgggaccggggccaacactggcagctggagatggcggacacgagatccgtgcacgagactaggtttgaggcggccgtgaaggtgatccagagtttgccgaagaatggttcattccagccaacaaatgaaatgatgcttaaattttatagcttctataagcaggcaactgaaggaccctgtaaactttcaaggcctggattttgggatcctattggaagatataaatgggatgcttggagttcactgggtgatatgaccaaagaggaagccatgattgcatatgttgaagaaatgaaaaagattattgaaactatgccaatgactgagaaagttgaagaattgctgcgtgtcataggtccattttatgaaattgtcgaggacaaaaagagtggcaggagttctgatataacctcagatcttggtaatgttctcacttctactccaaacgccaaaaccgttaatggtaaagctgaaagcagtgacagtggagccgagtctgaggaagaagaggcccaagaagaagtgaaaggagcagaacaaagtgataatgataagaaaatgatgaagaagtcagcagaccataagaatttggaagtcattgtcactaatggctatgataaaaatggctttgttcaggatatacagaatgacattcatgccagttcttccctgaatggcagaagcactgaagaagtaaagcccattgatgaaaacttggggcaaactggaaaatctgctgtttgcattcaccaagatataaatgatgatcatgttgaagatgttacaggaattcagcatttgacaagcgattcagacagtgaagtttactgtgattctatggaacaatttggacaagaagagtctttagacagctttacgtccaacaatggaccatttcagtattacttgggtggtcattccagtcaacccatggaaaattctggatttcgtgaagatattcaagtacctcctggaaatggcaacattgggaatatgcaggtggttgcagttgaaggaaaaggtgaagtcaagcatggaggagaagatggcaggaataacagcggagcaccacaccgggagaagcgaggcggagaaactgacgaattctctaatgttagaagaggaagaggacataggatgcaacacttgagcgaaggaaccaagggccggcaggtgggaagtggaggtgatggggagcgctggggctccgacagagggtcccgaggcagcctcaatgagcagatcgccctcgtgctgatgagactgcaggaggacatgcagaatgtccttcagagactgcagaaactggaaacgctgactgctttgcaggcaaaatcatcaacatcaacattgcagactgctcctcagcccacctcacagagaccatcttggtggcccttcgagatgtctcctggtgtgctaacgtttgccatcatatggccttttattgcacagtggttggtgtatttatactatcaaagaaggagaagaaaactgaacctcgag

SEQ ID NO: 280 - protein, 528 aa, Homo sapiens
ASTMFQFHAGSWESWCCCCLIPADRPWDRGQHWQLEMADTRSVHETRFEAAVKVIQSLPKNGSFQPTNEMMLKFYSFYKQATEGPCKLSRPGFWDPIGRYKWDAWSSLGDMTKEEAMIAYVEEMKKIIETMPMTEKVEELLRVIGPFYEIVEDKKSGRSSDITSDLGNVLTSTPNAKTVNGKAESSDSGAESEEEEAQEEVKGAEQSDNDKKMMKKSADHKNLEVIVTNGYDKNGFVQDIQNDIHASSSLNGRSTEEVKPIDENLGQTGKSAVCIHQDINDDHVEDVTGIQHLTSDSDSEVYCDSMEQFGQEESLDSFTSNNGPFQYYLGGHSSQPMENSGFREDIQVPPGNGNIGNMQVVAVEGKGEVKHGGEDGRNNSGAPHREKRGGETDEFSNVRRGRGHRMQHLSEGTKGRQVGSGGDGERWGSDRGSRGSLNEQIALVLMRLQEDMQNVLQRLQKLETLTALQAKSSTSTLQTAPQPTSQRPSWWPFEMSPGVLTFAIIWPFIAQWLVYLYYQRRRRKLNLE

SEQ ID NO: 281 - DNA, 1586 bp, Homo sapiens
  CDS (3)..(1586)
aagcttccaccatgttccagtttcatgcaggctcttgggaaagctggtgctgctgctgcctgattcccgccgacagaccttgggaccggggccaacactggcagctggagatggcggacacgagatccgtgcacgagactaggtttgaggcggccgtgaaggtgatccagagtttgccgaagaatggttcattccagccaacaaatgaaatgatgcttaaattttatagcttctataagcaggcaactgaaggaccctgtaaactttcaaggcctggattttgggatcctattggaagatataaatgggatgcttggagttcactgggtgatatgaccaaagaggaagccatgattgcatatgttgaagaaatgaaaaagattattgaaactatgccaatgactgagaaagttgaagaattgctgcgtgtcataggtccattttatgaaattgtcgaagacaaaaagagtggcaggagttctgatataacctcagatcttggtaatgttctcacttctactccgaacgccaaaaccgttaatggtaaagctgaaagcagtgacagtggagccgagtctgaggaagaagaggcccaagaagaagtgaaaggagcagaacaaagtgataatgataagaaaatgatgaagaagtcagcagaccataagaatttggaagtcattgtcactaatggctatgataaagatggctttgttcaggatatacagaatgacattcatgccagttcttccctgaatggcagaagcactgaagaagtaaagcccattgatgaaaacttggggcaaactggaaaatctgctgtttgcattcaccaagatataaatgatgatcatgttgaagatgttacaggaattcagcatttgacaagcgattcagacagtgaagtttactgtgattctatggaacaatttggacaagaagagtctttagacagctttacgtccaacaatggaccatttcagtattacttgggtggtcattccagtcaacccatggaaaattctggatttcgtgaatatattcaagtacctcctggaaatggcaacattgggaatatgcaggtggttgcagttgaaggaaaaggtgaagtcaagcatggaggagaagatggcaggaataacagcggagcaccacaccgggagaagcgaggcggagaaactgacgaattctctaatgttggaagaggaagaggacataggatgcaacacttgagcgaaggaaccaagggccggcaggtgggaagtggaggtgatggggagcgctggggctccgacagagggtcccgaggcagcctcaatgagcagatcgccctcgtgctgatgagactgcaggaggacatgcagaatgtccttcagagactgcagaaactggaaacgccgactgctttgcaggcaaaatcatcaacatcaacattgcagactgctcctcagcccacctcacagagaccatcttggtggcccttcgagatgtctcctggtgtgctaacgtttgccatcatatggccttttattgcacagtggttggtgtatttatactatcaaagaaggagaagaaaactgaacctcgag

SEQ ID NO: 282 - protein, 528 aa, Homo sapiens
ASTMFQFHAGSWESWCCCCLIPADRPWDRGQHWQLEMADTRSVHETRFEAAVKVIQSLPKNGSFQPTNEMMLKFYSFYKQATEGPCKLSRPGFWDPIGRYKWDAWSSLGDMTKEEAMIAYVEEMKKIIETMPMTEKVEELLRVIGPFYEIVEDKKSGRSSDITSDLGNVLTSTPNAKTVNGKAESSDSGAESEEEEAQEEVKGAEQSDNDKKMMKKSADHKNLEVIVTNGYDKDGFVQDIQNDIHASSSLNGRSTEEVKPIDENLGQTGKSAVCIHQDINDDHVEDVTGIQHLTSDSDSEVYCDSMEQFGQEESLDSFTSNNGPFQYYLGGHSSQPMENSGFREYIQVPPGNGNIGNMQVVAVEGKGEVKHGGEDGRNNSGAPHREKRGGETDEFSNVGRGRGHRMQHLSEGTKGRQVGSGGDGERWGSDRGSRGSLNEQIALVLMRLQEDMQNVLQRLQKLETPTALQAKSSTSTLQTAPQPTSQRPSWWPFEMSPGVLTFAIIWPFIAQWLVYLYYQRRRRKLNLE

SEQ ID NO: 283 - DNA, 22 bp, Artificial Sequence
  Description of Artifical Sequence:  Primer/Probe
agaggacaacagcctttctgtg

SEQ ID NO: 284 - DNA, 25 bp, Artificial Sequence
  Description of Artifical Sequence:  Primer/Probe
tcaacaggacccagagtggcaacca

SEQ ID NO: 285 - DNA, 20 bp, Artificial Sequence
  Description of Artifical Sequence:  Primer/Probe
ccaggagctcctggtacaca

SEQ ID NO: 286 - DNA, 22 bp, Artificial Sequence
  Description of Artifical Sequence:  Primer/Probe
cccagagtatctcaagggactt

SEQ ID NO: 287 - DNA, 28 bp, Artificial Sequence
  Description of Artifical Sequence:  Primer/Probe
taagctgtctctgctgatagactccttc

SEQ ID NO: 288 - DNA, 20 bp, Artificial Sequence
  Description of Artifical Sequence:  Primer/Probe
gtgagatcctgctgtgttgg

SEQ ID NO: 289 - DNA, 19 bp, Artificial Sequence
  Description of Artifical Sequence:  Primer/Probe
cagcgcagagaaatctcac

SEQ ID NO: 290 - DNA, 32 bp, Artificial Sequence
  Description of Artifical Sequence:  Primer/Probe
ttcccaatcccgaggaaaaccagagaagtagc

SEQ ID NO: 291 - DNA, 21 bp, Artificial Sequence
  Description of Artifical Sequence:  Primer/Probe
agagtaatgtggcaccgtctc

SEQ ID NO: 292 - DNA, 20 bp, Artificial Sequence
  Description of Artifical Sequence:  Primer/Probe
acgtgcaggtttgttacata

SEQ ID NO: 293 - DNA, 30 bp, Artificial Sequence
  Description of Artifical Sequence:  Primer/Probe
ttgtgctacacccattaactcgtcatttaa

SEQ ID NO: 294 - DNA, 17 bp, Artificial Sequence
  Description of Artifical Sequence:  Primer/Probe
accttggcagggctaat

SEQ ID NO: 295 - DNA, 21 bp, Artificial Sequence
  Description of Artifical Sequence:  Primer/Probe
ctctgtgtgaacggacaagag

SEQ ID NO: 296 - DNA, 23 bp, Artificial Sequence
  Description of Artifical Sequence:  Primer/Probe
tccctggactttgctgtgctcgt

SEQ ID NO: 297 - DNA, 22 bp, Artificial Sequence
  Description of Artifical Sequence:  Primer/Probe
ggactggcttacaaattttcgt

SEQ ID NO: 298 - DNA, 17 bp, Artificial Sequence
  Description of Artifical Sequence:  Primer/Probe
catcagggccagcaaga

SEQ ID NO: 299 - DNA, 29 bp, Artificial Sequence
  Description of Artifical Sequence:  Primer/Probe
tacacctcgtagcatttctcatccttctg

SEQ ID NO: 300 - DNA, 19 bp, Artificial Sequence
  Description of Artifical Sequence:  Primer/Probe
aggtggacaatcgcagttg

SEQ ID NO: 301 - DNA, 20 bp, Artificial Sequence
  Description of Artifical Sequence:  Primer/Probe
gctacaaaagggagccaggt

SEQ ID NO: 302 - DNA, 27 bp, Artificial Sequence
  Description of Artifical Sequence:  Primer/Probe
tacagccagtgtatccccaggaaactg

SEQ ID NO: 303 - DNA, 18 bp, Artificial Sequence
  Description of Artifical Sequence:  Primer/Probe
cagggaagatgcaggcat

SEQ ID NO: 304 - DNA, 14 bp, Artificial Sequence
  Description of Artifical Sequence:  Primer/Probe
tcccagggccatgg

SEQ ID NO: 305 - DNA, 28 bp, Artificial Sequence
  Description of Artifical Sequence:  Primer/Probe
tccaccccacctaaagtacctgtacctt

SEQ ID NO: 306 - DNA, 22 bp, Artificial Sequence
  Description of Artifical Sequence:  Primer/Probe
agttgagatgccagagtcagat

SEQ ID NO: 307 - DNA, 20 bp, Artificial Sequence
  Description of Artifical Sequence:  Primer/Probe
agaccaagctccagctgttt

SEQ ID NO: 308 - DNA, 23 bp, Artificial Sequence
  Description of Artifical Sequence:  Primer/Probe
tctctccccgtcctcactcgcct

SEQ ID NO: 309 - DNA, 7 bp, Artificial Sequence
  Description of Artifical Sequence:  Primer/Probe
asthmam

SEQ ID NO: 310 - DNA, 21 bp, Artificial Sequence
  Description of Artifical Sequence:  Primer/Probe
ctgcagatcgaggactttctg

SEQ ID NO: 311 - DNA, 19 bp, Artificial Sequence
  Description of Artifical Sequence:  Primer/Probe
tccgcccgaggagtccaac

SEQ ID NO: 312 - DNA, 20 bp, Artificial Sequence
  Description of Artifical Sequence:  Primer/Probe
gatgaacgcggagaacttgt

SEQ ID NO: 313 - DNA, 17 bp, Artificial Sequence
  Description of Artifical Sequence:  Primer/Probe
aaagatgaaactgcggt

SEQ ID NO: 314 - DNA, 19 bp, Artificial Sequence
  Description of Artifical Sequence:  Primer/Probe
ttccacgaggaggcaagca

SEQ ID NO: 315 - DNA, 16 bp, Artificial Sequence
  Description of Artifical Sequence:  Primer/Probe
agctgttgctctgact

SEQ ID NO: 316 - DNA, 21 bp, Artificial Sequence
  Description of Artifical Sequence:  Primer/Probe
ggagctttctgggaagactct

SEQ ID NO: 317 - DNA, 26 bp, Artificial Sequence
  Description of Artifical Sequence:  Primer/Probe
ttagaaaatgcacaggagcactccac

SEQ ID NO: 318 - DNA, 20 bp, Artificial Sequence
  Description of Artifical Sequence:  Primer/Probe
caaaatgcggaagatgaaca

SEQ ID NO: 319 - DNA, 22 bp, Artificial Sequence
  Description of Artifical Sequence:  Primer/Probe
cttcatcatcttcatgctggcg

SEQ ID NO: 320 - DNA, 28 bp, Artificial Sequence
  Description of Artifical Sequence:  Primer/Probe
tcactgctgctcaacatgctggagatat

SEQ ID NO: 321 - DNA, 19 bp, Artificial Sequence
  Description of Artifical Sequence:  Primer/Probe
ggctggtcacgccctgctt

SEQ ID NO: 322 - DNA, 27 bp, Artificial Sequence
  Description of Artifical Sequence:  Primer/Probe
gcggacttcaaaatgctagccctgacc

SEQ ID NO: 323 - DNA, 24 bp, Artificial Sequence
  Description of Artifical Sequence:  Primer/Probe
tccagtccgccaagctctacaacg

SEQ ID NO: 324 - DNA, 24 bp, Artificial Sequence
  Description of Artifical Sequence:  Primer/Probe
gcccagttctgctcagtcatcagc

SEQ ID NO: 325 - DNA, 22 bp, Artificial Sequence
  Description of Artifical Sequence:  Primer/Probe
gtctgcagacggtacactctgt

SEQ ID NO: 326 - DNA, 23 bp, Artificial Sequence
  Description of Artifical Sequence:  Primer/Probe
tcccaacccgacaggagtggaca

SEQ ID NO: 327 - DNA, 20 bp, Artificial Sequence
  Description of Artifical Sequence:  Primer/Probe
gcacttcttccttcattgca

SEQ ID NO: 328 - DNA, 22 bp, Artificial Sequence
  Description of Artifical Sequence:  Primer/Probe
gtctgcagacggtacactctgt

SEQ ID NO: 329 - DNA, 23 bp, Artificial Sequence
  Description of Artifical Sequence:  Primer/Probe
tcccaacccgacaggagtggaca

SEQ ID NO: 330 - DNA, 20 bp, Artificial Sequence
  Description of Artifical Sequence:  Primer/Probe
gcacttcttccttcattgca

SEQ ID NO: 331 - DNA, 22 bp, Artificial Sequence
  Description of Artifical Sequence:  Primer/Probe
gcaaaatcgtcgtctctgttac

SEQ ID NO: 332 - DNA, 23 bp, Artificial Sequence
  Description of Artifical Sequence:  Primer/Probe
tccctctgaaagccaccagcagt

SEQ ID NO: 333 - DNA, 22 bp, Artificial Sequence
  Description of Artifical Sequence:  Primer/Probe
ccaagaggttcacaaacactgt

SEQ ID NO: 334 - DNA, 22 bp, Artificial Sequence
  Description of Artifical Sequence:  Primer/Probe
gcaaaatcgtcgtctctgttac

SEQ ID NO: 335 - DNA, 23 bp, Artificial Sequence
  Description of Artifical Sequence:  Primer/Probe
tccctctgaaagccaccagcagt

SEQ ID NO: 336 - DNA, 22 bp, Artificial Sequence
  Description of Artifical Sequence:  Primer/Probe
ccaagaggttcacaaacactgt

SEQ ID NO: 337 - DNA, 20 bp, Artificial Sequence
  Description of Artifical Sequence:  Primer/Probe
tcgttgtccgtgcagttcag

SEQ ID NO: 338 - DNA, 22 bp, Artificial Sequence
  Description of Artifical Sequence:  Primer/Probe
tcagaccacccggaactcgcgt

SEQ ID NO: 339 - DNA, 20 bp, Artificial Sequence
  Description of Artifical Sequence:  Primer/Probe
cggccgtgtacaatgtgtct

SEQ ID NO: 340 - DNA, 20 bp, Artificial Sequence
  Description of Artifical Sequence:  Primer/Probe
atggtcctggtgaattacat

SEQ ID NO: 341 - DNA, 30 bp, Artificial Sequence
  Description of Artifical Sequence:  Primer/Probe
tcttctttaaagagagataggtgagctcta

SEQ ID NO: 342 - DNA, 20 bp, Artificial Sequence
  Description of Artifical Sequence:  Primer/Probe
ctcaaatacatcaagcacag

SEQ ID NO: 343 - DNA, 21 bp, Artificial Sequence
  Description of Artifical Sequence:  Primer/Probe
ctgacctgtcaaggaccattg

SEQ ID NO: 344 - DNA, 26 bp, Artificial Sequence
  Description of Artifical Sequence:  Primer/Probe
ttcaacaggcccttcctgatgatcat

SEQ ID NO: 345 - DNA, 22 bp, Artificial Sequence
  Description of Artifical Sequence:  Primer/Probe
ccagtttgaattccaagttcct

SEQ ID NO: 346 - DNA, 20 bp, Artificial Sequence
  Description of Artifical Sequence:  Primer/Probe
aaggctcagaacagcaggat

SEQ ID NO: 347 - DNA, 24 bp, Artificial Sequence
  Description of Artifical Sequence:  Primer/Probe
tcaactcttccacaaggtggccca

SEQ ID NO: 348 - DNA, 20 bp, Artificial Sequence
  Description of Artifical Sequence:  Primer/Probe
gctttgcagatgctgaattc

SEQ ID NO: 349 - DNA, 20 bp, Artificial Sequence
  Description of Artifical Sequence:  Primer/Probe
ggcctctccgtacccttctc

SEQ ID NO: 350 - DNA, 23 bp, Artificial Sequence
  Description of Artifical Sequence:  Primer/Probe
taccaggatcacgacctccgcag

SEQ ID NO: 351 - DNA, 19 bp, Artificial Sequence
  Description of Artifical Sequence:  Primer/Probe
agaggctcttggcgcagtt

SEQ ID NO: 352 - DNA, 36 bp, Artificial Sequence
  Description of Artifical Sequence:  Primer/Probe
aagcttgacagaccttgggaccggggccaacactgg

SEQ ID NO: 353 - DNA, 36 bp, Artificial Sequence
  Description of Artifical Sequence:  Primer/Probe
ctcgagaggagacatctcgaagggccaccaagatgg

SEQ ID NO: 354 - DNA, 31 bp, Artificial Sequence
  Description of Artifical Sequence:  Primer/Probe
aagcttactaggtttgaggcggccgtgaagg

SEQ ID NO: 355 - DNA, 36 bp, Artificial Sequence; identical to SEQ ID NO: 353
  Description of Artifical Sequence:  Primer/Probe

SEQ ID NO: 356 - DNA, 38 bp, Artificial Sequence
  Description of Artifical Sequence:  Primer/Probe
aagcttccaccatgttccagtttcatgcaggctcttgg

SEQ ID NO: 357 - DNA, 34 bp, Artificial Sequence
  Description of Artifical Sequence:  Primer/Probe
ctcgaggttcagttttcttctccttctttgatag

SEQ ID NO: 358 - DNA, 25 bp, Artificial Sequence
  Description of Artifical Sequence:  Primer/Probe
gcagtctctgaaggacattctgcat

SEQ ID NO: 359 - DNA, 25 bp, Artificial Sequence
  Description of Artifical Sequence:  Primer/Probe
tgttattcctgccatcttctcctcc

SEQ ID NO: 360 - DNA, 25 bp, Artificial Sequence
  Description of Artifical Sequence:  Primer/Probe
acttcactgtctgaatcgcttgtca

SEQ ID NO: 361 - DNA, 27 bp, Artificial Sequence
  Description of Artifical Sequence:  Primer/Probe
ttcttatggtctgctgacttcttcatc

SEQ ID NO: 362 - DNA, 25 bp, Artificial Sequence
  Description of Artifical Sequence:  Primer/Probe
tgacacgcagcaattcttcaacttt

SEQ ID NO: 363 - DNA, 25 bp, Artificial Sequence
  Description of Artifical Sequence:  Primer/Probe
actgcagaaactggaaacgctgact

SEQ ID NO: 364 - DNA, 24 bp, Artificial Sequence
  Description of Artifical Sequence:  Primer/Probe
gagaagatggcaggaataacagcg

SEQ ID NO: 365 - DNA, 29 bp, Artificial Sequence
  Description of Artifical Sequence:  Primer/Probe
gtttactgtgattctatggaacaatttgg

SEQ ID NO: 366 - DNA, 30 bp, Artificial Sequence
  Description of Artifical Sequence:  Primer/Probe
ccataagaatttggaagtcattgtcactaa

SEQ ID NO: 367 - DNA, 29 bp, Artificial Sequence
  Description of Artifical Sequence:  Primer/Probe
tcataggtccattttatgaaattgtcgag

SEQ ID NO: 368 - DNA, 23 bp, Artificial Sequence
  Description of Artifical Sequence:  Primer/Probe
catgtcctcctgcagtctcatca

SEQ ID NO: 369 - DNA, 27 bp, Artificial Sequence
  Description of Artifical Sequence:  Primer/Probe
cttcaactgcaaccacctgcatattcc

SEQ ID NO: 370 - DNA, 26 bp, Artificial Sequence
  Description of Artifical Sequence:  Primer/Probe
gctgaattcctgtaacatcttcaaca

SEQ ID NO: 371 - DNA, 31 bp, Artificial Sequence
  Description of Artifical Sequence:  Primer/Probe
ttttcttatcattatcactttgttctgctcc

SEQ ID NO: 372 - DNA, 26 bp, Artificial Sequence
  Description of Artifical Sequence:  Primer/Probe
attcttcaactttctcagtcattggc

SEQ ID NO: 373 - DNA, 24 bp, Artificial Sequence
  Description of Artifical Sequence:  Primer/Probe
gctgatgagactgcaggaggacat

SEQ ID NO: 374 - DNA, 25 bp, Artificial Sequence
  Description of Artifical Sequence:  Primer/Probe
gaaaaggtgaagtcaagcatggagg

SEQ ID NO: 375 - DNA, 23 bp, Artificial Sequence
  Description of Artifical Sequence:  Primer/Probe
tcagcatttgacaagcgattcag

SEQ ID NO: 376 - DNA, 27 bp, Artificial Sequence
  Description of Artifical Sequence:  Primer/Probe
aagaagtcagcagaccataagaatttg

SEQ ID NO: 377 - DNA, 23 bp, Artificial Sequence
  Description of Artifical Sequence:  Primer/Probe
gctgcgtgtcataggtccatttt

SEQ ID NO: 378 - DNA, 26 bp, Artificial Sequence
  Description of Artifical Sequence:  Primer/Probe
caaagcagtcagcgtttccagtttct

SEQ ID NO: 379 - DNA, 24 bp, Artificial Sequence
  Description of Artifical Sequence:  Primer/Probe
cgctgttattcctgccatcttctc

SEQ ID NO: 380 - DNA, 24 bp, Artificial Sequence
  Description of Artifical Sequence:  Primer/Probe
tcgcttgtcaaatgctgaattcct

SEQ ID NO: 381 - DNA, 27 bp, Artificial Sequence
  Description of Artifical Sequence:  Primer/Probe
tatcactttgttctgctcctttcactt

SEQ ID NO: 382 - DNA, 24 bp, Artificial Sequence
  Description of Artifical Sequence:  Primer/Probe
tcaacatatgcaatcatggcttcc

SEQ ID NO: 383 - DNA, 27 bp, Artificial Sequence
  Description of Artifical Sequence:  Primer/Probe
gcaaaatcatcaacatcaacattgcag

SEQ ID NO: 384 - DNA, 27 bp, Artificial Sequence
  Description of Artifical Sequence:  Primer/Probe
aggcggagaaactgacgaattctctaa

SEQ ID NO: 385 - DNA, 26 bp, Artificial Sequence
  Description of Artifical Sequence:  Primer/Probe
acaagcgattcagacagtgaagttta

SEQ ID NO: 386 - DNA, 27 bp, Artificial Sequence
  Description of Artifical Sequence:  Primer/Probe
tgataagaaaatgatgaagaagtcagc

SEQ ID NO: 387 - DNA, 27 bp, Artificial Sequence
  Description of Artifical Sequence:  Primer/Probe
tgaaaaagattattgaaactatgccaa

SEQ ID NO: 388 - DNA, 1860 bp, Homo sapiens; identical to SEQ ID NO: 187

SEQ ID NO: 389 - protein, 1413 aa, Homo sapiens
TCGCACCTGGAACCCCAACGTCCCCGAGAGTCCCCGAATCCCCGCTCCCAGGCTACCTAAGAGGATGAGCGGTGCTCCGACGGCCGGGGCAGCCCTGATGCTCTGCGCCGCCACCGCCGTGCTACTGAGCGCTCAGGGCGGACCCGTGCAGTCCAAGTCGCCGCGCTTTGCGTCCTGGGACGAGATGAATGTCCTGGCGCACGGACTCCTGCAGCTCGGCCAGGGGCTGCGCGAACACGCGGAGCGCACCCGCAGTCAGCTGAGCGCGCTGGAGCGGCGCCTGAGCGCGTGCGGGTCCGCCTGTCAGGGAACCGAGGGGTCCACCGACCTCCCGTTAGCCCCTGAGAGCCGGGTGGACCCTGAGGTCCTTCACAGCCTGCAGACACAACTCAAGGCTCAGAACAGCAGGATCCAGCAACTCTTCCACAAGGTGGCCCAGCAGCAGCGGCACCTGGAGAAGCAGCACCTGCGAATTCAGCATCTGCAAAGCCAGTTTGGCCTCCTGGACCACAAGCACCTAGACCATGAGGTGGCCAAGCCTGCCCGAAGAAAGAGGCTGCCCGAGATGGCCCAGCCAGTTGACCCGCCTCACAATGTCAGCCGCCTGCACCGGCTGCCCAGGGATTGCCAGGAGCTGTTCCAGGTTGGGGAGAGGCAGAGTGGACTATTTGAAATCCAGCCTCAGGGGTCTCCGCCATTTTTGGTGAACTGCAAGATGACCTCAGATGGAGGCTGGACAGTAATTCAGAGGCGCCACGATGGCTCAGTGGACTTCAACCGGCCCTGGGAAGCCTACAAGGCGGGGTTTGGGGATCCCCACGGCGAGTTCTGGCTGGGTCTGGAGAAGGTGCATAGCATCATGGGGGACCGCAACAGCCGCCTGGCCGTGCAGCTGCGGGACTGGGATGGCAACGCCGAGTTGCTGCAGTTCTCCGTGCACCTGGGTGGCGAGGACACGGCCTATAGCCTGCAGTTCACTGCACCCGTGGCCGGCCAGCTGGGCGCCACCACCGTCCCACCCAGCGGCCTCTCCGTACCCTTCTCCACTTGGGACCAGGATCACGACCTCCGCAGGGACAAGAACTGCGCCAAGAGCCTCTCTGGAGGCTGGTGGTTTGGCACCTGCAGCCATTCCAACCTCAACGGCCAGTACTTCCGCTCCATCCCACAGCAGCGGCAGAAGCTTAAGAAGGGAATCTTCTGGAAGACCTGGCGGGGCCGCTACTACTCGCTGCAGGCCACCACCATGTTGATCCAGCCCATGGCAGCAGAGGCAGCCTCCTAGCGTCCTGGCTGGGCCTGGTCCCAGGCCCACGAAAGACGGTGACTCTTGGCTCTGCCCGAGGATGTGGCCGTTCCCTGCCTGGGCAGGGGCTCCAAGGAGGGGCCATCTGGAAACTTGTGGACAGAGAA

SEQ ID NO: 390 - DNA, 1943 bp, Homo sapiens
ggagaagaagccgagctgagcggatcctcacacgactgtgatccgattctttccagcggcttctgcaaccaagcgggtcttacccccggtcctccgcgtctccagtcctcgcacctggaaccccaacgtccccgagagtccccgaatccccgctcccaggctacctaagaggatgagcggtgctccgacggccggggcagccctgatgctctgcgccgccaccgccgtgctactgagcgctcagggcggacccgtgcagtccaagtcgccgcgctttgcgtcctgggacgagatgaatgtcctggcgcacggactcctgcagctcggccaggggctgcgcgaacacgcggagcgcacccgcagtcagctgagcgcgctggagcggcgcctgagcgcgtgcgggtccgcctgtcagggaaccgaggggtccaccgacctcccgttagcccctgagagccgggtggaccctgaggtccttcacagcctgcagacacaactcaaggctcagaacagcaggatccagcaactcttccacaaggtggcccagcagcagcggcacctggagaagcagcacctgcgaattcagcatctgcaaagccagtttggcctcctggaccacaagcacctagaccatgaggtggccaagcctgcccgaagaaagaggctgcccgagatggcccagccagttgacccggctcacaatgtcagccgcctgcaccggctgcccagggattgccaggagctgttccaggttggggagaggcagagtggactatttgaaatccagcctcaggggtctccgccatttttggtgaactgcaagatgacctcagatggaggctggacagtaattcagaggcgccacgatggctcagtggacttcaaccggccctgggaagcctacaaggcggggtttggggatccccacggcgagttctggctgggtctggagaaggtgcatagcatcacgggggaccgcaacagccgcctggccgtgcagctgcgggactgggatggcaacgccgagttgctgcagttctccgtgcacctgggtggcgaggacacggcctatagcctgcagctcactgcacccgtggccggccagctgggcgccaccaccgtcccacccagcggcctctccgtacccttctccacttgggaccaggatcacgacctccgcagggacaagaactgcgccaagagcctctctggaggctggtggtttggcacctgcagccattccaacctcaacggccagtacttccgctccatcccacagcagcggcagaagcttaagaagggaatcttctggaagacctggcggggccgctactacccgctgcaggccaccaccatgttgatccagcccatggcagcagaggcagcctcctagcgtcctggctgggcctggtcccaggcccacgaaagacggtgactcttggctctgcccgaggatgtggccgttccctgcctgggcaggggctccaaggaggggccatctggaaacttgtggacagagaagaagaccacgactggagaagccccctttctgagtgcaggggggctgcatgcgttgcctcctgagatcgaggctgcaggatatgctcagactctagaggcgtggaccaaggggcatggagcttcactccttgctggccagggagttggggactcagagggaccacttggggccagccagactggcctcaatggcggactcagtcacattgactgacggggaccagggcttgtgtgggtcgagagcgccctcatggtgctggtgctgttgtgtgtaggtcccctggggacacaagcaggcgccaatggtatctgggcggcgtcacagagttcttggaataaaagcaacctcagaacacttaaaaaaaaaaaaaaaaaaaaaaaaaaaaaaaaaaaaaaaaaaaaaaaaaaaaaaaaaaaaaaaa

SEQ ID NO: 391 - protein, 405 aa, Homo sapiens [sequence omitted]

SEQ ID NO: 392 - protein, 406 aa, Homo sapiens; identical to SEQ ID NO: 236

SEQ ID NO: 393 - DNA, 30 bp, Artificial Sequence
  Description of Artifical Sequence:  Primer/Probe
atctggaaacttgtggacagagaagaagac

SEQ ID NO: 394 - protein, 244 aa, Artificial Sequence
  Description of Artifical Sequence:  Domain
LPEMAQPVDPAHNVSRLHRLPRDCQELFQVGERQSGLFEIQPQGSPPFLVNCKMTSDGGWTVIQRRHDGSVDFNRPWEAYKAGFGDPHGEFWLGLEKVHSITGDRNSRLAVQLRDWDGNAELLQFSVHLGGEDTAYSLQLTAPVAGQLGATTVPPSGLSVPFSTWDQDHDLRRDKNCAKSLSGGWWFGTCSHSNLNGQYFRSIPQQRQKLKKGIFWKTWRGRYYPLQATTMLIQPMAAEAASLE

SEQ ID NO: 395 - protein, 406 aa, Homo sapiens; identical to SEQ ID NO: 236

SEQ ID NO: 396 - protein, 381 aa, Homo sapiens; identical to SEQ ID NO: 224

SEQ ID NO: 397 - protein, 385 aa, Homo sapiens; identical to SEQ ID NO: 192

What is claimed is:

1. An isolated polypeptide comprising the mature form of an amino acid sequenced selected from the group consisting of SEQ ID NO:2n, wherein n is an integer between 1 and 141.

2. An isolated polypeptide comprising an amino acid sequence selected from the group consisting of SEQ ID NO:2n, wherein n is an integer between 1 and 141.

3. An isolated polypeptide comprising an amino acid sequence which is at least 95% identical to an amino acid sequence selected from the group consisting of SEQ ID NO:2n, wherein n is an integer between 1 and 141.

4. An isolated polypeptide, wherein the polypeptide comprises an amino acid sequence comprising one or more conservative substitutions in the amino acid sequence selected from the group consisting of SEQ ID NO:2n, wherein n is an integer between 1 and 141.

5. The polypeptide of claim 1 wherein said polypeptide is naturally occurring.

6. A composition comprising the polypeptide of claim 1 and a carrier.

7. A kit comprising, in one or more containers, the composition of claim 6.

8. The use of a therapeutic in the manufacture of a medicament for treating a syndrome associated with a human disease, the disease selected from a pathology associated with the polypeptide of claim 1, wherein the therapeutic comprises the polypeptide of claim 1.

9. A method for determining the presence or amount of the polypeptide of claim 1 in a sample, the method comprising:
(a) providing said sample;
(b) introducing said sample to an antibody that binds immunospecifically to the polypeptide; and
(c) determining the presence or amount of antibody bound to said polypeptide, thereby determining the presence or amount of polypeptide in said sample.

10. A method for determining the presence of or predisposition to a disease associated with altered levels of expression of the polypeptide of claim 1 in a first mammalian subject, the method comprising:
a) measuring the level of expression of the polypeptide in a sample from the first mammalian subject; and
b) comparing the expression of said polypeptide in the sample of step (a) to the expression of the polypeptide present in a control sample from a second mammalian subject known not to have, or not to be predisposed to, said disease,
wherein an alteration in the level of expression of the polypeptide in the first subject as compared to the control sample indicates the presence of or predisposition to said disease.

11. A method of identifying an agent that binds to the polypeptide of claim 1, the method comprising:
(a) introducing said polypeptide to said agent; and
(b) determining whether said agent binds to said polypeptide.

12. The method of claim 11 wherein the agent is a cellular receptor or a downstream effector.

13. A method for identifying a potential therapeutic agent for use in treatment of a pathology, wherein the pathology is related to aberrant expression or aberrant physiological interactions of the polypeptide of claim 1, the method comprising:
(a) providing a cell expressing the polypeptide of claim 1 and having a property or function ascribable to the polypeptide;
(b) contacting the cell with a composition comprising a candidate substance; and
(c) determining whether the substance alters the property or function ascribable to the polypeptide;
whereby, if an alteration observed in the presence of the substance is not observed when the cell is contacted with a composition in the absence of the substance, the substance is identified as a potential therapeutic agent.

14. A method for screening for a modulator of activity of or of latency or predisposition to a pathology associated with the polypeptide of claim 1, said method comprising:
(a) administering a test compound to a test animal at increased risk for a pathology associated with the polypeptide of claim 1, wherein said test animal recombinantly expresses the polypeptide of claim 1;
(b) measuring the activity of said polypeptide in said test animal after administering the compound of step (a); and
(c) comparing the activity of said polypeptide in said test animal with the activity of said polypeptide in a control animal not administered said polypeptide, wherein a change in the activity of said polypeptide in said test animal relative to said control animal indicates the test compound is a modulator activity of or latency or predisposition to, a pathology associated with the polypeptide of claim 1.

15. The method of claim 14, wherein said test animal is a recombinant test animal that expresses a test protein transgene or expresses said transgene under the control of a promoter at an increased level relative to a wild-type test animal, and wherein said promoter is not the native gene promoter of said transgene.

16. A method for modulating the activity of the polypeptide of claim 1, the method comprising contacting a cell sample expressing the polypeptide of claim 1 with a compound that binds to said polypeptide in an amount sufficient to modulate the activity of the polypeptide.

17. A method of treating or preventing a pathology associated with the polypeptide of claim 1, the method comprising administering the polypeptide of claim 1 to a subject in which such treatment or prevention is desired in an amount sufficient to treat or prevent the pathology in the subject.

18. The method of claim 17, wherein the subject is a human.

19. A method of treating a pathological state in a mammal, the method comprising administering to the mammal a polypeptide in an amount that is sufficient to alleviate the pathological state, wherein the polypeptide is a polypeptide having an amino acid sequence at least 95% identical to a polypeptide comprising the amino acid sequence selected from the group consisting of SEQ ID NO:2n, wherein n is an integer between 1 and 141 or a biologically active fragment thereof.

20. An isolated nucleic acid molecule comprising a nucleic acid sequence selected from the group consisting of SEQ ID NO:2n−1, wherein n is an integer between 1 and 141.

21. The nucleic acid molecule of claim 20, wherein the nucleic acid molecule is naturally occurring.

22. A nucleic acid molecule, wherein the nucleic acid molecule differs by a single nucleotide from a nucleic acid sequence selected from the group consisting of SEQ ID NO: 2n−1, wherein n is an integer between 1 and 141.

23. An isolated nucleic acid molecule encoding the mature form of a polypeptide having an amino acid sequence selected from the group consisting of SEQ ID NO:2n, wherein n is an integer between 1 and 141.

24. An isolated nucleic acid molecule comprising a nucleic acid selected from the group consisting of 2n−1, wherein n is an integer between 1 and 141.

25. The nucleic acid molecule of claim 20, wherein said nucleic acid molecule hybridizes under stringent conditions to the nucleotide sequence selected from the group consisting of SEQ ID NO: 2n−1, wherein n is an integer between 1 and 141, or a complement of said nucleotide sequence.

26. A vector comprising the nucleic acid molecule of claim 20.

27. The vector of claim 26, further comprising a promoter operably linked to said nucleic acid molecule.

28. A cell comprising the vector of claim 26.

29. An antibody that immunospecifically binds to the polypeptide of claim 1.

30. The antibody of claim 29, wherein the antibody is a monoclonal antibody.

31. The antibody of claim 29, wherein the antibody is a humanized antibody.

32. A method for determining the presence or amount of the nucleic acid molecule of claim 20 in a sample, the method comprising:
(a) providing said sample;
(b) introducing said sample to a probe that binds to said nucleic acid molecule;
and
(c) determining the presence or amount of said probe bound to said nucleic acid molecule, thereby determining the presence or amount of the nucleic acid molecule in said sample.

33. The method of claim 32 wherein presence or amount of the nucleic acid molecule is used as a marker for cell or tissue type.

34. The method of claim 33 wherein the cell or tissue type is cancerous.

35. A method for determining the presence of or predisposition to a disease associated with altered levels of expression of the nucleic acid molecule of claim 20 in a first mammalian subject, the method comprising:
a) measuring the level of expression of the nucleic acid in a sample from the first mammalian subject; and
b) comparing the level of expression of said nucleic acid in the sample of step (a) to the level of expression of the nucleic acid present in a control sample from a second mammalian subject known not to have or not be predisposed to, the disease;
wherein an alteration in the level of expression of the nucleic acid in the first subject as compared to the control sample indicates the presence of or predisposition to the disease.

36. A method of producing the polypeptide of claim 1, the method comprising culturing a cell under conditions that lead to expression of the polypeptide, wherein said cell comprises a vector comprising an isolated nucleic acid molecule comprising a nucleic acid sequence selected from the group consisting of SEQ ID NO:2n−1, wherein n is an integer between 1 and 141.

37. The method of claim 36 wherein the cell is a bacterial cell.

38. The method of claim 36 wherein the cell is an insect cell.

39. The method of claim 36 wherein the cell is a yeast cell.

40. The method of claim 36 wherein the cell is a mammalian cell.

41. A method of producing the polypeptide of claim 2, the method comprising culturing a cell under conditions that lead to expression of the polypeptide, wherein said cell comprises a vector comprising an isolated nucleic acid molecule comprising a nucleic acid sequence selected from the group consisting of SEQ ID NO:2n−1, wherein n is an integer between 1 and 141.

42. The method of claim 41 wherein the cell is a bacterial cell.

43. The method of claim 41 wherein the cell is an insect cell.

44. The method of claim 41 wherein the cell is a yeast cell.

45. The method of claim 41 wherein the cell is a mammalian cell.
